(19) United States
(12) Patent Application Publication
(10) Pub. No.: US 2022/0112473 A1
(43) Pub. Date: Apr. 14, 2022

(54) ENGINEERED PROTEINS AND METHODS OF USE THEREOF

(71) Applicant: Pairwise Plants Services, Inc., Durham, NC (US)

(72) Inventors: Sharon Leigh Guffy, Durham, NC (US); Joseph Matthew Watts, Cary, NC (US)

(21) Appl. No.: 17/459,166

(22) Filed: Aug. 27, 2021

Related U.S. Application Data
(60) Provisional application No. 63/071,734, filed on Aug. 28, 2020.

(51) Int. Cl. C12N 9/22; C12N 15/11

(52) U.S. Cl. CPC C12N 9/22; C12N 2310/20; C12N 15/111

(57) ABSTRACT

Described herein are engineered proteins and methods of use of such proteins. Also described herein are complexes, compositions, and systems including engineered proteins of the present invention, each of which may be used for modifying or editing a target nucleic acid. An engineered protein of the present invention may be an enzyme and/or may be an RNA-guided DNA-binding protein.

### STATEMENT REGARDING ELECTRONIC FILING OF A SEQUENCE LISTING

[0001] A Sequence Listing in ASCII text format, submitted under 37 C.F.R. § 1.821, entitled 1499-37_ST25, 922,214 bytes in size, generated on Aug. 27, 2021, and filed via EFS-Web, is provided in lieu of a paper copy. This Sequence Listing is hereby incorporated herein by reference into the specification for its disclosures.

### FIELD

[0002] This invention relates to engineered proteins (e.g., engineered enzymes) and to methods of use of such proteins. The invention further relates to compositions and systems for modifying or editing a target nucleic acid.

### BACKGROUND OF THE INVENTION

[0003] Type II CRISPR endonucleases, including the widely used SpCas9, share a common mechanism for DNA cleavage. Enzymes in this family contain two nuclease domains (HNH and RuvC), each of which cleaves a single DNA strand. When the Cas9-sgRNA complex (or Cas9-crRNA-trRNA complex) binds its target DNA sequence, the target DNA strand binds to the RNA spacer sequence while the nontarget DNA strand forms a single-stranded loop. The HNH domain of Cas9 cleaves the target DNA strand, and the RuvC domain cleaves the nontarget strand (FIG. 1). As illustrated in FIG. 1, for Type II CRISPR endonucleases (e.g., Cas9), the target and nontarget DNA strands are cleaved simultaneously by the HNH and RuvC domains, respectively, forming blunt-ended double strand breaks.

[0004] Unlike the Type II CRISPR endonucleases, the Type V CRISPR endonucleases (such as Cas12a) have only a single nuclease domain that sequentially cleaves both DNA strands beginning with the nontarget strand. As illustrated in FIG. 2, for Type V endonucleases (e.g., Cas12a), the RuvC domain cleaves the nontarget and target DNA strands sequentially, resulting in staggered double-strand breaks.

[0005] Although Type II and Type V CRISPR endonucleases perform similar functions, their mechanisms and structures are highly divergent. The two different types are thought to have evolved from different precursors, and only the RuvC domain shares any significant sequence or structural homology across the two types. Type V CRISPR endonucleases lack the HNH domain responsible for target strand cleavage in Type II enzymes. Instead, the RuvC domain in Type V CRISPR endonucleases cleaves both DNA strands sequentially (FIG. 2) beginning with the nontarget strand. Therefore, mutating the catalytic residue of the RuvC domain prevents all nuclease activity and produces a deactivated enzyme rather than producing a target strand nickase. A nontarget strand nickase mutation has been identified in Cas12a; however, this mutation is outside the RuvC domain and is thought to function by reducing the overall catalytic efficiency of the enzyme. No Type V CRISPR target strand nickase exists, and, in view of the differences in structure and mechanism of action for Type V CRISPR endonucleases compared to Type II CRISPR endonucleases, there is no clear way of producing one.

### SUMMARY OF THE INVENTION

[0006] A first aspect of the present invention is directed to an engineered protein comprising at least two different polypeptides, wherein one of the at least two different polypeptides is a first CRISPR-Cas effector polypeptide that is a first portion of a first Type V CRISPR-Cas effector protein and the first CRISPR-Cas effector polypeptide is devoid of a nuclease domain; and wherein another of the least two different polypeptides is a heterologous polypeptide that is heterologous to the Type V CRISPR-Cas effector protein and is not a portion of a Type V CRISPR-Cas effector protein.

[0007] Another aspect of the present invention is directed to an engineered protein comprising: a first nuclease domain, wherein the first nuclease domain is a target strand nickase domain or a portion thereof, wherein the first nuclease domain is not a Type V nuclease domain or a portion thereof; and a first CRISPR-Cas effector polypeptide that is a portion of a Type V CRISPR-Cas effector protein. In some embodiments, the first nuclease domain is a target strand specific nickase domain or a target and nontarget strand nickase domain.

[0008] A further aspect of the present invention is directed to an engineered protein comprising: a first polypeptide that is a first portion of a first Type V CRISPR-Cas effector protein; a second polypeptide that is a second portion of the first Type V CRISPR-Cas effector protein; and a heterologous polypeptide that is heterologous to the first Type V CRISPR-Cas effector protein, wherein the heterologous polypeptide is between the first and second polypeptides and the heterologous polypeptide is positioned in the engineered protein in a location that corresponds to an interdomain linker region of the first Type V CRISPR-Cas effector protein.

[0009] An additional aspect of the present invention is directed to an engineered protein comprising an amino acid sequence having at least 70%, 75%, 80%, 85%, 90%, 95%, 96%, 97%, 98%, 99%, or more sequence identity to any one of SEQ ID NOs:2-17 or 125-132, optionally wherein the engineered protein comprises an amino acid sequence of any one of SEQ ID NOs:2-17 or 125-132.

[0010] A further aspect of the present invention is directed to a composition (e.g., a base editing composition) or system comprising: an engineered protein as described herein; a guide nucleic acid (e.g., a guide RNA), and optionally a deaminase, optionally wherein the engineered protein, guide nucleic acid, and optionally deaminase form a complex or are comprised in a complex.

[0011] Another aspect of the present invention is directed to a complex comprising: an engineered protein as described herein; a guide nucleic acid (e.g., a guide RNA); and optionally a deaminase.

[0012] An additional aspect of the present invention is directed to a nucleic acid molecule comprising a nucleotide sequence encoding an engineered protein as described herein.

[0013] Another aspect of the present invention is directed to a method of modifying a target nucleic acid, the method comprising: contacting the target nucleic acid with: an engineered protein as described herein, and a guide nucleic acid (e.g., a guide RNA), optionally wherein the engineered protein and the guide nucleic acid form a complex or are comprised in a complex, thereby modifying the target nucleic acid.

[0014] A further aspect of the present invention is directed to a method of increasing the efficiency of modifying a target nucleic acid, the method comprising: contacting the target nucleic acid with: an engineered protein as described herein, and a guide nucleic acid (e.g., a guide RNA), optionally wherein the engineered protein and the guide nucleic acid form a complex or are comprised in a complex, thereby modifying the target nucleic acid.

[0015] The invention further provides expression cassettes and/or vectors comprising a nucleic acid construct of the present invention, and cells comprising a polypeptide, fusion protein and/or nucleic acid construct of the present invention. Additionally, the invention provides kits comprising a nucleic acid construct of the present invention and expression cassettes, vectors and/or cells comprising the same.

[0016] It is noted that aspects of the invention described with respect to one embodiment, may be incorporated in a different embodiment although not specifically described relative thereto. That is, all embodiments and/or features of any embodiment can be combined in any way and/or combination. Applicant reserves the right to change any originally filed claim and/or file any new claim accordingly, including the right to be able to amend any originally filed claim to depend from and/or incorporate any feature of any other claim or claims although not originally claimed in that manner. These and other objects and/or aspects of the present invention are explained in detail in the specification set forth below. Further features, advantages and details of the present invention will be appreciated by those of ordinary skill in the art from a reading of the figures and the detailed description of the preferred embodiments that follow, such description being merely illustrative of the present invention.

### BRIEF DESCRIPTION OF THE DRAWINGS

[0017] FIG. 1 is an illustration depicting the mechanism of action for Type II CRISPR endonucleases.

[0018] FIG. 2 is an illustration depicting the mechanism of action for Type V CRISPR endonucleases.

[0019] FIG. 3 is the crystal structure of SpCas9 (PDB ID 4UN3) bound to a single guide RNA (sgRNA) and target DNA. Domains shown are as follows: RuvC, bridge helix, Rec1, Rec2, HNH, and PAM-interacting.

[0020] FIG. 4 is a diagram of Cas12a domains viewed facing the Rec lobe. From this view, a portion of the crRNA/target DNA duplex is visibly exposed to the surface of Cas12a.

[0021] FIG. 5 is an overlay of the HNH domain from SpCas9 onto the candidate insertion site in LbCas12a.

[0022] FIG. 6 is an illustration depicting the soluble fraction lysed Escherichia coli expressing HNH-3287, 3288, 3289, 3290, 3296, 3297, 3298, and 3299.

[0023] FIG. 7 is an illustration depicting the nicking activity of purified HNH-3287, 3288, 3289, 3290, 3296, 3297, and 3298.

[0024] FIG. 8 is an image of a gel that indicates that nickases according to some embodiments of the present invention were solubly expressed in E. coli.

[0025] FIG. 9 is an image of a gel that indicates that nickases according to some embodiments of the present invention can nick a DNA substrate.

[0026] FIG. 10 is an image of a gel that indicates that nickases according to some embodiments of the present invention can be RNA-dependent.

[0027] FIG. 11 is an image of a gel that indicates that nickases according to some embodiments of the present invention can act as a DNA nickase.

[0028] FIG. 12 is an illustration showing a labeled target strand.

[0029] FIG. 13 is an illustration showing a labeled non-target strand.

[0030] FIG. 14 is an image of a gel including samples incubated with a labeled target strand.

[0031] FIG. 15 is an image of a gel including samples incubated with a labeled non-target strand.

[0032] FIG. 16 is an image of the entire gel showing the lanes of FIG. 14 and FIG. 15 along with the lanes for the controls.

[0033] FIG. 17 is an illustration showing editing efficiencies for respective enzyme pairs according to some embodiments of the present invention.

[0034] FIGS. 18-21 are graphs showing the percentage of C to T editing for various target regions corresponding to the respective spacers: FANCF spacer 1 (FIG. 18), FANCF spacer 2 (FIG. 19), AAVS1 spacer 1 (FIG. 20), and AAVS1 spacer 2 (FIG. 21).

[0035] FIGS. 22-23 are graphs showing the percentage of A to G editing for various target regions corresponding to the respective spacers: RNF2 spacer 1 (FIG. 22) and RNF2 spacer 2 (FIG. 23).

### DETAILED DESCRIPTION

[0036] The present invention now will be described hereinafter with reference to the accompanying drawings and examples, in which embodiments of the invention are shown. This description is not intended to be a detailed catalog of all the different ways in which the invention may be implemented, or all the features that may be added to the instant invention. For example, features illustrated with respect to one embodiment may be incorporated into other embodiments, and features illustrated with respect to a particular embodiment may be deleted from that embodiment. Thus, the invention contemplates that in some embodiments of the invention, any feature or combination of features set forth herein can be excluded or omitted. In addition, numerous variations and additions to the various embodiments suggested herein will be apparent to those skilled in the art in light of the instant disclosure, which do not depart from the instant invention. Hence, the following descriptions are intended to illustrate some particular embodiments of the invention, and not to exhaustively specify all permutations, combinations and variations thereof.

[0037] Unless otherwise defined, all technical and scientific terms used herein have the same meaning as commonly understood by one of ordinary skill in the art to which this invention belongs. The terminology used in the description of the invention herein is for the purpose of describing particular embodiments only and is not intended to be limiting of the invention.

[0038] All publications, patent applications, patents and other references cited herein are incorporated by reference in their entireties for the teachings relevant to the sentence and/or paragraph in which the reference is presented.

[0039] Unless the context indicates otherwise, it is specifically intended that the various features of the invention described herein can be used in any combination. Moreover, the present invention also contemplates that in some embodiments of the invention, any feature or combination of features set forth herein can be excluded or omitted. To illustrate, if the specification states that a composition comprises components A, B and C, it is specifically intended that any of A, B or C, or a combination thereof, can be omitted and disclaimed singularly or in any combination.

[0040] As used in the description of the invention and the appended claims, the singular forms “a,” “an” and “the” are intended to include the plural forms as well, unless the context clearly indicates otherwise.

[0041] Also as used herein, “and/or” refers to and encompasses any and all possible combinations of one or more of the associated listed items, as well as the lack of combinations when interpreted in the alternative (“or”).

[0042] The term “about,” as used herein when referring to a measurable value such as an amount or concentration and the like, is meant to encompass variations of ±10%, ±5%, ±1%, ±0.5%, or even 0.1% of the specified value as well as the specified value. For example, “about X” where X is the measurable value, is meant to include X as well as variations of 10%, ±5%, ±1%, ±0.5%, or even ±0.1% of X. A range provided herein for a measureable value may include any other range and/or individual value therein.

[0043] As used herein, phrases such as “between X and Y” and “between about X and Y” should be interpreted to include X and Y. As used herein, phrases such as “between about X and Y” mean “between about X and about Y” and phrases such as “from about X to Y” mean “from about X to about Y.”

[0044] Recitation of ranges of values herein are merely intended to serve as a shorthand method of referring individually to each separate value falling within the range, unless otherwise indicated herein, and each separate value is incorporated into the specification as if it were individually recited herein. For example, if the range 10 to 15 is disclosed, then 11, 12, 13, and 14 are also disclosed.

[0045] The term “comprise,” “comprises” and “comprising” as used herein, specify the presence of the stated features, integers, steps, operations, elements, and/or components, but do not preclude the presence or addition of one or more other features, integers, steps, operations, elements, components, and/or groups thereof.

[0046] As used herein, the transitional phrase “consisting essentially of” means that the scope of a claim is to be interpreted to encompass the specified materials or steps recited in the claim and those that do not materially affect the basic and novel characteristic(s) of the claimed invention. Thus, the term “consisting essentially of” when used in a claim of this invention is not intended to be interpreted to be equivalent to “comprising.”

[0047] As used herein, the terms “increase,” “increasing,” “enhance,” “enhancing,” “improve” and “improving” (and grammatical variations thereof) describe an elevation of at least about 5%, 10%, 15%, 20%, 25%, 30%, 35%, 40%, 45%, 50%, 55%, 60%, 65%, 70%, 75%, 80%, 85%, 90%, 95%, 100%, 150%, 200%, 300%, 400%, 500% or more such as compared to another measurable property or quantity (e.g., a control value).

[0048] As used herein, the terms “reduce,” “reduced,” “reducing,” “reduction,” “diminish,” and “decrease” (and grammatical variations thereof), describe, for example, a decrease of at least about 5%, 10%, 15%, 20%, 25%, 30%, 35%, 40%, 45%, 50%, 55%, 60%, 65%, 70%, 75%, 80%, 85%, 90%, 95%, 97%, 98%, 99%, or 100% such as compared to another measurable property or quantity (e.g., a control value). In some embodiments, the reduction can result in no or essentially no (i.e., an insignificant amount, e.g., less than about 10% or even 5%) detectable activity or amount.

[0049] A “heterologous nucleotide sequence” or a “recombinant nucleotide sequence” is a nucleotide sequence not naturally associated with a host cell into which it is introduced, including non-naturally occurring multiple copies of a naturally occurring nucleotide sequence.

[0050] A “native” or “wild-type” nucleic acid, nucleotide sequence, polypeptide or amino acid sequence refers to a naturally occurring or endogenous nucleic acid, nucleotide sequence, polypeptide or amino acid sequence. Thus, for example, a “wild-type mRNA” is an mRNA that is naturally occurring in or endogenous to the reference organism. A “homologous” nucleic acid sequence is a nucleotide sequence naturally associated with a host cell into which it is introduced.

[0051] As used herein, the terms “nucleic acid,” “nucleic acid molecule,” “nucleotide sequence” and “polynucleotide” refer to RNA or DNA that is linear or branched, single or double stranded, or a hybrid thereof. The term also encompasses RNA/DNA hybrids. When dsRNA is produced synthetically, less common bases, such as inosine, 5-methylcytosine, 6-methyladenine, hypoxanthine and others can also be used for antisense, dsRNA, and ribozyme pairing. For example, polynucleotides that contain C-5 propyne analogues of uridine and cytidine have been shown to bind RNA with high affinity and to be potent antisense inhibitors of gene expression. Other modifications, such as modification to the phosphodiester backbone, or the 2′-hydroxy in the ribose sugar group of the RNA can also be made.

[0052] As used herein, the term “nucleotide sequence” refers to a heteropolymer of nucleotides or the sequence of these nucleotides from the 5′ to 3′ end of a nucleic acid molecule and includes DNA or RNA molecules, including cDNA, a DNA fragment or portion, genomic DNA, synthetic (e.g., chemically synthesized) DNA, plasmid DNA, mRNA, and anti-sense RNA, any of which can be single stranded or double stranded. The terms “nucleotide sequence” “nucleic acid,” “nucleic acid molecule,” “nucleic acid construct,” “recombinant nucleic acid,” “oligonucleotide” and “polynucleotide” are also used interchangeably herein to refer to a heteropolymer of nucleotides. Nucleic acid molecules and/or nucleotide sequences provided herein are presented herein in the 5′ to 3′ direction, from left to right and are represented using the standard code for representing the nucleotide characters as set forth in the U.S. sequence rules, 37 CFR §§ 1.821-1.825 and the World Intellectual Property Organization (WIPO) Standard ST.25. A “5′ region” as used herein can mean the region of a polynucleotide that is nearest the 5′ end of the polynucleotide. Thus, for example, an element in the 5′ region of a polynucleotide can be located anywhere from the first nucleotide located at the 5′ end of the polynucleotide to the nucleotide located halfway through the polynucleotide. A “3′ region” as used herein can mean the region of a polynucleotide that is nearest the 3′ end of the polynucleotide. Thus, for example, an element in the 3′ region of a polynucleotide can be located anywhere from the first nucleotide located at the 3′ end of the polynucleotide to the nucleotide located halfway through the polynucleotide.

[0053] As used herein, the term “gene” refers to a nucleic acid molecule capable of being used to produce mRNA, antisense RNA, miRNA, anti-microRNA antisense oligodeoxyribonucleotide (AMO) and the like. Genes may or may not be capable of being used to produce a functional protein or gene product. Genes can include both coding and non-coding regions (e.g., introns, regulatory elements, promoters, enhancers, termination sequences and/or 5′ and 3′ untranslated regions).

[0054] A polynucleotide, gene, or polypeptide may be “isolated” by which is meant a nucleic acid or polypeptide that is substantially or essentially free from components normally found in association with the nucleic acid or polypeptide, respectively, in its natural state. In some embodiments, such components include other cellular material, culture medium from recombinant production, and/or various chemicals used in chemically synthesizing the nucleic acid or polypeptide.

[0055] The term “mutation” refers to point mutations (e.g., missense, or nonsense, or insertions or deletions of single base pairs that result in frame shifts), insertions, deletions, and/or truncations. When the mutation is a substitution of a residue within an amino acid sequence with another residue, or a deletion or insertion of one or more residues within a sequence, the mutations are typically described by identifying the original residue followed by the position of the residue within the sequence and by the identity of the newly substituted residue.

[0056] The terms “complementary” or “complementarity,” as used herein, refer to the natural binding of polynucleotides under permissive salt and temperature conditions by base-pairing. For example, the sequence “A-G-T” (5′ to 3′) binds to the complementary sequence “T-C-A” (3′ to 5′). Complementarity between two single-stranded molecules may be “partial,” in which only some of the nucleotides bind, or it may be complete when total complementarity exists between the single stranded molecules. The degree of complementarity between nucleic acid strands has significant effects on the efficiency and strength of hybridization between nucleic acid strands.

[0057] “Complement” as used herein can mean 100% complementarity with the comparator nucleotide sequence or it can mean less than 100% complementarity (e.g., “substantially complementary,” such as about 70%, 71%, 72%, 73%, 74%, 75%, 76%, 77%, 78%, 79%, 80%, 81%, 82%, 83%, 84%, 85%, 86%, 87%, 88%, 89%, 90%, 91%, 92%, 93%, 94%, 95%, 96%, 97%, 98%, 99%, and the like, complementarity).

[0058] A “portion” or “fragment” of a nucleotide sequence or polypeptide (including a domain) will be understood to mean a nucleotide sequence or polypeptide of reduced length (e.g., reduced by 1, 2, 3, 4, 5, 6, 7, 8, 9, 10, 11, 12, 13, 14, 15, 16, 17, 18, 19, 20 or more residue(s) (e.g., nucleotide(s) or peptide(s)) relative to a reference nucleotide sequence or polypeptide, respectively, and comprising, consisting essentially of and/or consisting of a nucleotide sequence or polypeptide of contiguous residues, respectively, identical or almost identical (e.g., 70%, 71%, 72%, 73%, 74%, 75%, 76%, 77%, 78%, 79%, 80%, 81%, 82%, 83%, 84%, 85%, 86%, 87%, 88%, 89%, 90%, 91%, 92%, 93%, 94%, 95%, 96%, 97%, 98%, 99% identical) to the reference nucleotide sequence or polypeptide. Such a nucleic acid fragment or portion according to the invention may be, where appropriate, included in a larger polynucleotide of which it is a constituent. As an example, a repeat sequence of guide nucleic acid of this invention may comprise a portion of a wild-type CRISPR-Cas repeat sequence (e.g., a wild-type Type V CRISPR Cas repeat, e.g., a repeat from the CRISPR Cas system that includes, but is not limited to, Cas12a (Cpf1), Cas12b, Cas12c (C2c3), Cas12d (CasY), Cas12e (CasX), Cas12g, Cas12h, Cas12i, C2c1, C2c4, C2c5, C2c8, C2c9, C2c10, Cas14a, Cas14b, and/or Cas14c, and the like).

[0059] Different nucleic acids or proteins having homology are referred to herein as “homologues.” The term homologue includes homologous sequences from the same and other species and orthologous sequences from the same and other species. “Homology” refers to the level of similarity between two or more nucleic acid and/or amino acid sequences in terms of percent of positional identity (i.e., sequence similarity or identity). Homology also refers to the concept of similar functional properties among different nucleic acids or proteins. Thus, the compositions and methods of the invention further comprise homologues to the nucleotide sequences and polypeptides of this invention. “Orthologous” and “orthologs” as used herein, refers to homologous nucleotide sequences and/or amino acid sequences in different species that arose from a common ancestral gene during speciation. A homologue or ortholog of a nucleotide sequence of this invention has a substantial sequence identity (e.g., at least about 70%, 71%, 72%, 73%, 74%, 75%, 76%, 77%, 78%, 79%, 80%, 81%, 82%, 83%, 84%, 85%, 86%, 87%, 88%, 89%, 90%, 91%, 92%, 93%, 94%, 95%, 96%, 97%, 98%, 99%, 99.5% or 100%) to said nucleotide sequence of the invention.

[0060] As used herein “sequence identity” refers to the extent to which two optimally aligned polynucleotide or polypeptide sequences are invariant throughout a window of alignment of components, e.g., nucleotides or amino acids. “Identity” can be readily calculated by known methods including, but not limited to, those described in: Computational Molecular Biology (Lesk, A. M., ed.) Oxford University Press, New York (1988); Biocomputing: Informatics and Genome Projects (Smith, D. W., ed.) Academic Press, New York (1993); Computer Analysis of Sequence Data, Part I (Griffin, A. M., and Griffin, H. G., eds.) Humana Press, New Jersey (1994); Sequence Analysis in Molecular Biology (von Heinje, G., ed.) Academic Press (1987); and Sequence Analysis Primer (Gribskov, M. and Devereux, J., eds.) Stockton Press, New York (1991).

[0061] As used herein, the term “percent sequence identity” or “percent identity” refers to the percentage of identical nucleotides in a linear polynucleotide sequence of a reference (“query”) polynucleotide molecule (or its complementary strand) as compared to a test (“subject”) polynucleotide molecule (or its complementary strand) when the two sequences are optimally aligned. In some embodiments, “percent identity” can refer to the percentage of identical amino acids in an amino acid sequence as compared to a reference polypeptide.

[0062] As used herein, the phrase “substantially identical,” or “substantial identity” in the context of two nucleic acid molecules, nucleotide sequences or protein sequences, refers to two or more sequences or subsequences that have at least about 70%, 71%, 72%, 73%, 74%, 75%, 76%, 77%, 78%, 79%, 80%, 81%, 82%, 83%, 84%, 85%, 86%, 87%, 88%, 89%, 90%, 91%, 92%, 93%, 94%, 95%, 96%, 97%, 98%, 99%, 99.5% or 100% nucleotide or amino acid residue identity, when compared and aligned for maximum correspondence, as measured using one of the following sequence comparison algorithms or by visual inspection. In some embodiments of the invention, the substantial identity exists over a region of consecutive nucleotides of a nucleotide sequence of the invention that is about 10 nucleotides to about 20 nucleotides, about 10 nucleotides to about 25 nucleotides, about 10 nucleotides to about 30 nucleotides, about 15 nucleotides to about 25 nucleotides, about 30 nucleotides to about 40 nucleotides, about 50 nucleotides to about 60 nucleotides, about 70 nucleotides to about 80 nucleotides, about 90 nucleotides to about 100 nucleotides, or more nucleotides in length, and any range therein, up to the full length of the sequence. In some embodiments, the nucleotide sequences can be substantially identical over at least about 20 nucleotides (e.g., about 20, 21, 22, 23, 24, 25, 26, 27, 28, 29, 30, 31, 32, 33, 34, 35, 36, 37, 38, 39, 40 nucleotides). In some embodiments, a substantially identical nucleotide or protein sequence performs substantially the same function as the nucleotide (or encoded protein sequence) to which it is substantially identical.

[0063] For sequence comparison, typically one sequence acts as a reference sequence to which test sequences are compared. When using a sequence comparison algorithm, test and reference sequences are entered into a computer, subsequence coordinates are designated if necessary, and sequence algorithm program parameters are designated. The sequence comparison algorithm then calculates the percent sequence identity for the test sequence(s) relative to the reference sequence, based on the designated program parameters.

[0064] Optimal alignment of sequences for aligning a comparison window are well known to those skilled in the art and may be conducted by tools such as the local homology algorithm of Smith and Waterman, the homology alignment algorithm of Needleman and Wunsch, the search for similarity method of Pearson and Lipman, and optionally by computerized implementations of these algorithms such as GAP, BESTFIT, FASTA, and TFASTA available as part of the GCG® Wisconsin Package® (Accelrys Inc., San Diego, Calif.). An “identity fraction” for aligned segments of a test sequence and a reference sequence is the number of identical components which are shared by the two aligned sequences divided by the total number of components in the reference sequence segment, e.g., the entire reference sequence or a smaller defined part of the reference sequence. Percent sequence identity is represented as the identity fraction multiplied by 100. The comparison of one or more polynucleotide sequences may be to a full-length polynucleotide sequence or a portion thereof, or to a longer polynucleotide sequence. For purposes of this invention “percent identity” may also be determined using BLASTX version 2.0 for translated nucleotide sequences and BLASTN version 2.0 for polynucleotide sequences.

[0065] Two nucleotide sequences may also be considered substantially complementary when the two sequences hybridize to each other under stringent conditions. In some representative embodiments, two nucleotide sequences considered to be substantially complementary hybridize to each other under highly stringent conditions.

[0066] “Stringent hybridization conditions” and “stringent hybridization wash conditions” in the context of nucleic acid hybridization experiments such as Southern and Northern hybridizations are sequence dependent, and are different under different environmental parameters. An extensive guide to the hybridization of nucleic acids is found in Tijssen Laboratory Techniques in Biochemistry and Molecular Biology-Hybridization with Nucleic Acid Probes part I chapter 2 “Overview of principles of hybridization and the strategy of nucleic acid probe assays” Elsevier, New York (1993). Generally, highly stringent hybridization and wash conditions are selected to be about 5° C. lower than the thermal melting point (Tₘ) for the specific sequence at a defined ionic strength and pH.

[0067] The Tₘ is the temperature (under defined ionic strength and pH) at which 50% of the target sequence hybridizes to a perfectly matched probe. Very stringent conditions are selected to be equal to the Tₘ for a particular probe. An example of stringent hybridization conditions for hybridization of complementary nucleotide sequences which have more than 100 complementary residues on a filter in a Southern or northern blot is 50% formamide with 1 mg of heparin at 42° C., with the hybridization being carried out overnight. An example of highly stringent wash conditions is 0.1 5M NaCl at 72° C. for about 15 minutes. An example of stringent wash conditions is a 0.2×SSC wash at 65° C. for 15 minutes (see, Sambrook, infra, for a description of SSC buffer).

[0068] Often, a high stringency wash is preceded by a low stringency wash to remove background probe signal. An example of a medium stringency wash for a duplex of, e.g., more than 100 nucleotides, is 1×SSC at 45° C. for 15 minutes. An example of a low stringency wash for a duplex of, e.g., more than 100 nucleotides, is 4-6×SSC at 40° C. for 15 minutes. For short probes (e.g., about 10 to 50 nucleotides), stringent conditions typically involve salt concentrations of less than about 1.0 M Na ion, typically about 0.01 to 1.0 M Na ion concentration (or other salts) at pH 7.0 to 8.3, and the temperature is typically at least about 30° C. Stringent conditions can also be achieved with the addition of destabilizing agents such as formamide. In general, a signal to noise ratio of 2× (or higher) than that observed for an unrelated probe in the particular hybridization assay indicates detection of a specific hybridization. Nucleotide sequences that do not hybridize to each other under stringent conditions are still substantially identical if the proteins that they encode are substantially identical. This can occur, for example, when a copy of a nucleotide sequence is created using the maximum codon degeneracy permitted by the genetic code.

[0069] A polynucleotide and/or recombinant nucleic acid construct of this invention can be codon optimized for expression. In some embodiments, a polynucleotide, nucleic acid construct, expression cassette, and/or vector of the present invention (e.g., that comprises/encodes an engineered protein, a nucleic acid binding domain (e.g., a DNA binding domain such as a sequence-specific DNA binding domain from a polynucleotide-guided endonuclease, a zinc finger nuclease, a transcription activator-like effector nuclease (TALEN), an Argonaute protein, and/or a CRISPR-Cas effector protein), a guide nucleic acid, a cytosine deaminase and/or adenine deaminase) may be codon optimized for expression in an organism (e.g., an animal, a plant, a fungus, an archaeon, or a bacterium). In some embodiments, the codon optimized nucleic acid constructs, polynucleotides, expression cassettes, and/or vectors of the invention have about 70% to about 99.9% (e.g., 70%, 71%, 72%, 73%, 74%, 75%, 76%, 77%, 78%, 79%, 80%, 81%, 82%, 83%, 84%, 85%, 86%, 87%, 88%, 89%, 90%, 91%, 92%, 93%, 94%, 95%, 96%, 97%, 98%, 99%, 99.5%. 99.9% or 100%) identity or more to the reference nucleic acid constructs, polynucleotides, expression cassettes, and/or vectors but which have not been codon optimized.

[0070] In any of the embodiments described herein, a polynucleotide or nucleic acid construct of the invention may be operatively associated with a variety of promoters and/or other regulatory elements for expression in an organism or cell thereof (e.g., a plant and/or a cell of a plant). Thus, in some embodiments, a polynucleotide or nucleic acid construct of this invention may further comprise one or more promoters, introns, enhancers, and/or terminators operably linked to one or more nucleotide sequences. In some embodiments, a promoter may be operably associated with an intron (e.g., Ubi1 promoter and intron). In some embodiments, a promoter associated with an intron maybe referred to as a “promoter region” (e.g., Ubi1 promoter and intron).

[0071] By “operably linked” or “operably associated” as used herein in reference to polynucleotides, it is meant that the indicated elements are functionally related to each other, and are also generally physically related. Thus, the term “operably linked” or “operably associated” as used herein, refers to nucleotide sequences on a single nucleic acid molecule that are functionally associated. Thus, a first nucleotide sequence that is operably linked to a second nucleotide sequence means a situation when the first nucleotide sequence is placed in a functional relationship with the second nucleotide sequence. For instance, a promoter is operably associated with a nucleotide sequence if the promoter effects the transcription or expression of said nucleotide sequence. Those skilled in the art will appreciate that the control sequences (e.g., promoter) need not be contiguous with the nucleotide sequence to which it is operably associated, as long as the control sequences function to direct the expression thereof. Thus, for example, intervening untranslated, yet transcribed, nucleic acid sequences can be present between a promoter and the nucleotide sequence, and the promoter can still be considered “operably linked” to the nucleotide sequence.

[0072] As used herein, the term “linked,” or “fused” in reference to polypeptides, refers to the attachment of one polypeptide to another. A polypeptide may be linked or fused to another polypeptide (at the N-terminus or the C-terminus) directly (e.g., via a peptide bond) or through a linker (e.g., a peptide linker).

[0073] The term “linker” in reference to polypeptides is art-recognized and refers to a chemical group, or a molecule linking two molecules or moieties, e.g., two domains of a fusion protein, such as, for example, a CRISPR-Cas effector protein and a peptide tag and/or a polypeptide of interest. A linker may be comprised of a single linking molecule (e.g., a single amino acid) or may comprise more than one linking molecule. In some embodiments, the linker can be an organic molecule, group, polymer, or chemical moiety such as a bivalent organic moiety. In some embodiments, the linker may be an amino acid or it may be a peptide. In some embodiments, the linker is a peptide.

[0074] In some embodiments, a peptide linker useful with this invention may be about 2 to about 100 or more amino acids in length, for example, about 2, 3, 4, 5, 6, 7, 8, 9, 10, 11, 12, 13, 14, 15, 16, 17, 18, 19, 20, 21, 22, 23, 24, 25, 26, 27, 28, 29, 30, 31, 32, 33, 34, 35, 36, 37, 38, 39, 40, 41, 42, 43, 44, 45, 46, 47, 48, 49, 50, 51, 52, 53, 54, 55, 56, 57, 58, 59, 60, 61, 62, 63, 64, 65, 66, 67, 68, 69, 70, 71, 72, 73, 74, 75, 76, 77, 78, 79, 80, 81, 82, 83, 84, 85, 86, 87, 88, 89, 90, 91, 92, 93, 94, 95, 96, 97, 98, 99, 100 or more amino acids in length (e.g., about 2 to about 40, about 2 to about 50, about 2 to about 60, about 4 to about 40, about 4 to about 50, about 4 to about 60, about 5 to about 40, about 5 to about 50, about 5 to about 60, about 9 to about 40, about 9 to about 50, about 9 to about 60, about 10 to about 40, about 10 to about 50, about 10 to about 60, or about 2, 3, 4, 5, 6, 7, 8, 9, 10, 11, 12, 13, 14, 15, 16, 17, 18, 19, 20, 21, 22, 23, 24, 25 amino acids to about 26, 27, 28, 29, 30, 31, 32, 33, 34, 35, 36, 37, 38, 39, 40, 41, 42, 43, 44, 45, 46, 47, 48, 49, 50, 51, 52, 53, 54, 55, 56, 57, 58, 59, 60, 61, 62, 63, 64, 65, 66, 67, 68, 69, 70, 71, 72, 73, 74, 75, 76, 77, 78, 79, 80, 81, 82, 83, 84, 85, 86, 87, 88, 89, 90, 91, 92, 93, 94, 95, 96, 97, 98, 99, 100 or more amino acids in length (e.g., about 105, 110, 115, 120, 130, 140 150 or more amino acids in length). In some embodiments, a peptide linker may be a GS linker. In some embodiments, the peptide linker has one of the amino acid sequences of SEQ ID NOs:18-47. In some embodiments, the peptide linker may comprise an amino acid sequence of (GGS)ₙ, GS, SG, GSSG (SEQ ID NO:175), S(GGS)ₙ(SEQ ID NO:42), SGGS (SEQ ID NO:43), or (GGGGS)n (SEQ ID NO:44), wherein n is an integer of 1-20 (e.g., 1, 2, 3, 4, 5, 6, 7, 8, 9, 10, 11, 12, 13, 14, 15, 16, 17, 18, 19, or 20). In some embodiments, the peptide linker may comprise the amino acid sequence: SGGSGGSGGS (SEQ ID NO:45). In some embodiments, the peptide linker may comprise the amino acid sequence: SGSETPGTSESATPES (SEQ ID NO:46), also referred to as the XTEN linker. In some embodiments, the peptide linker may comprise the amino acid sequence: SGGSSGGSSGSETPGTSESATPESSGGSSGGS (SEQ ID NO:47), also referred to as the GS-XTEN-GS linker.

[0075] As used herein, the term “linked,” or “fused” in reference to polynucleotides, refers to the attachment of one polynucleotide to another polynucleotide. In some embodiments, two or more polynucleotide molecules may be linked by a linker that can be an organic molecule, group, polymer, or chemical moiety such as a bivalent organic moiety. A polynucleotide may be linked or fused to another polynucleotide (at the 5′ end or the 3′ end) via a covalent or non-covenant linkage or binding, including e.g., Watson-Crick base-pairing, or through one or more linking nucleotides. In some embodiments, a polynucleotide motif of a certain structure may be inserted within another polynucleotide sequence (e.g., extension of the hairpin structure in guide RNA). In some embodiments, the linking nucleotides may be naturally occurring nucleotides. In some embodiments, the linking nucleotides may be non-naturally occurring nucleotides.

[0076] A “promoter” is a nucleotide sequence that controls or regulates the transcription of a nucleotide sequence (e.g., a coding sequence) that is operably associated with the promoter. The coding sequence controlled or regulated by a promoter may encode a polypeptide and/or a functional RNA. Typically, a “promoter” refers to a nucleotide sequence that contains a binding site for RNA polymerase II and directs the initiation of transcription. In general, promoters are found 5′, or upstream, relative to the start of the coding region of the corresponding coding sequence. A promoter may comprise other elements that act as regulators of gene expression; e.g., a promoter region. These include a TATA box consensus sequence, and often a CAAT box consensus sequence (Breathnach and Chambon, (1981) Annu. Rev. Biochem. 50:349). In plants, the CAAT box may be substituted by the AGGA box (Messing et al., (1983) in Genetic Engineering of Plants, T. Kosuge, C. Meredith and A. Hollaender (eds.), Plenum Press, pp. 211-227). In some embodiments, a promoter region may comprise at least one intron (e.g., SEQ ID NO:48 or SEQ ID NO:49).

[0077] Promoters useful with this invention can include, for example, constitutive, inducible, temporally regulated, developmentally regulated, chemically regulated, tissue-preferred and/or tissue-specific promoters for use in the preparation of recombinant nucleic acid molecules, e.g., “synthetic nucleic acid constructs” or “protein-RNA complex.” These various types of promoters are known in the art.

[0078] The choice of promoter may vary depending on the temporal and spatial requirements for expression, and also may vary based on the host cell to be transformed. Promoters for many different organisms are well known in the art. Based on the extensive knowledge present in the art, the appropriate promoter can be selected for the particular host organism of interest. Thus, for example, much is known about promoters upstream of highly constitutively expressed genes in model organisms and such knowledge can be readily accessed and implemented in other systems as appropriate.

[0079] In some embodiments, a promoter functional in a plant may be used with the constructs of this invention. Non-limiting examples of a promoter useful for driving expression in a plant include the promoter of the RubisCo small subunit gene 1 (PrbcS1), the promoter of the actin gene (Pactin), the promoter of the nitrate reductase gene (Pnr) and the promoter of duplicated carbonic anhydrase gene 1 (Pdca1) (See, Walker et al. Plant Cell Rep. 23:727-735 (2005); Li et al. Gene 403:132-142 (2007); Li et al. Mol Biol. Rep. 37:1143-1154 (2010)). PrbcS1 and Pactin are constitutive promoters and Pnr and Pdca1 are inducible promoters. Pnr is induced by nitrate and repressed by ammonium (Li et al. Gene 403:132-142 (2007)) and Pdca1 is induced by salt (Li et al. Mol Biol. Rep. 37:1143-1154 (2010)).

[0080] Examples of constitutive promoters useful for plants include, but are not limited to, cestrum virus promoter (cmp) (U.S. Pat. No. 7,166,770), the rice actin 1 promoter (Wang et al. (1992) Mol. Cell. Biol. 12:3399-3406; as well as U.S. Pat. No. 5,641,876), CaMV 35S promoter (Odell et al. (1985) Nature 313:810-812), CaMV 19S promoter (Lawton et al. (1987) Plant Mol. Biol. 9:315-324), nos promoter (Ebert et al. (1987) Proc. Natl. Acad. Sci USA 84:5745-5749), Adh promoter (Walker et al. (1987) Proc. Natl. Acad. Sci. USA 84:6624-6629), sucrose synthase promoter (Yang & Russell (1990) Proc. Natl. Acad. Sci. USA 87:4144-4148), and the ubiquitin promoter. The constitutive promoter derived from ubiquitin accumulates in many cell types. Ubiquitin promoters have been cloned from several plant species for use in transgenic plants, for example, sunflower (Binet et al., 1991. Plant Science 79: 87-94), maize (Christensen et al., 1989. Plant Molec. Biol. 12: 619-632), and Arabidopsis (Norris et al. 1993. Plant Molec. Biol. 21:895-906). The maize ubiquitin promoter (UbiP) has been developed in transgenic monocot systems and its sequence and vectors constructed for monocot transformation are disclosed in the European patent publication EP0342926. The ubiquitin promoter is suitable for the expression of the nucleotide sequences of the invention in transgenic plants, especially monocotyledons. Further, the promoter expression cassettes described by McElroy et al. (Mol. Gen. Genet. 231: 150-160 (1991)) can be easily modified for the expression of the nucleotide sequences of the invention and are particularly suitable for use in monocotyledonous hosts.

[0081] In some embodiments, tissue specific/tissue preferred promoters can be used for expression of a heterologous polynucleotide in a plant cell. Tissue specific or preferred expression patterns include, but are not limited to, green tissue specific or preferred, root specific or preferred, stem specific or preferred, flower specific or preferred or pollen specific or preferred. Promoters suitable for expression in green tissue include many that regulate genes involved in photosynthesis and many of these have been cloned from both monocotyledons and dicotyledons. In one embodiment, a promoter useful with the invention is the maize PEPC promoter from the phosphoenol carboxylase gene (Hudspeth & Grula, Plant Molec. Biol. 12:579-589 (1989)). Non-limiting examples of tissue-specific promoters include those associated with genes encoding the seed storage proteins (such as β-conglycinin, cruciferin, napin and phaseolin), zein or oil body proteins (such as oleosin), or proteins involved in fatty acid biosynthesis (including acyl carrier protein, stearoyl-ACP desaturase and fatty acid desaturases (fad 2-1)), and other nucleic acids expressed during embryo development (such as Bce4, see, e.g., Kridl et al. (1991) Seed Sci. Res. 1:209-219; as well as EP Patent No. 255378). Tissue-specific or tissue-preferential promoters useful for the expression of the nucleotide sequences of the invention in plants, particularly maize, include but are not limited to those that direct expression in root, pith, leaf or pollen. Such promoters are disclosed, for example, in WO 93/07278, incorporated by reference herein for its disclosure of promoters. Other non-limiting examples of tissue specific or tissue preferred promoters useful with the invention the cotton rubisco promoter disclosed in U.S. Pat. No. 6,040,504; the rice sucrose synthase promoter disclosed in U.S. Pat. No. 5,604,121; the root specific promoter described by de Framond (FEBS 290:103-106 (1991); European patent EP 0452269 to Ciba-Geigy); the stem specific promoter described in U.S. Pat. No. 5,625,136 (to Ciba-Geigy) and which drives expression of the maize trpA gene; the cestrum yellow leaf curling virus promoter disclosed in WO 01/73087; and pollen specific or preferred promoters including, but not limited to, ProOsLPS10 and ProOsLPS11 from rice (Nguyen et al. Plant Biotechnol. Reports 9(5):297-306 (2015)), ZmSTK2_USP from maize (Wang et al. Genome 60(6):485-495 (2017)), LAT52 and LAT59 from tomato (Twell et al. Development 109(3):705-713 (1990)), Zm13 (U.S. Pat. No. 10,421,972), PLA2-S promoter from Arabidopsis (U.S. Pat. No. 7,141,424), and/or the ZmC5 promoter from maize (International PCT Publication No. WO 1999/042587).

[0082] Additional examples of plant tissue-specific/tissue preferred promoters include, but are not limited to, the root hair-specific cis-elements (RHEs) (KIM ET AL. The Plant Cell 18:2958-2970 (2006)), the root-specific promoters RCc3 (Jeong et al. Plant Physiol. 153:185-197 (2010)) and RB7 (U.S. Pat. No. 5,459,252), the lectin promoter (Lindstrom et al. (1990) Der. Genet. 11:160-167; and Vodkin (1983)Prog. Clin. Biol. Res. 138:87-98), corn alcohol dehydrogenase 1 promoter (Dennis et al. (1984) Nucleic Acids Res. 12:3983-4000), S-adenosyl-L-methionine synthetase (SAMS) (Vander Mijnsbrugge et al. (1996) Plant and Cell Physiology, 37(8):1108-1115), corn light harvesting complex promoter (Bansal et al. (1992)Proc. Natl. Acad. Sci. USA 89:3654-3658), corn heat shock protein promoter (O'Dell et al. (1985) EMBO J. 5:451-458; and Rochester et al. (1986) EMBO J. 5:451-458), pea small subunit RuBP carboxylase promoter (Cashmore, “Nuclear genes encoding the small subunit of ribulose-1,5-bisphosphate carboxylase” pp. 29-39 In: Genetic Engineering of Plants (Hollaender ed., Plenum Press 1983; and Poulsen et al. (1986) Mol. Gen. Genet. 205:193-200), Ti plasmid mannopine synthase promoter (Langridge et al. (1989) Proc. Natl. Acad. Sci. USA 86:3219-3223), Ti plasmid nopaline synthase promoter (Langridge et al. (1989), supra), petunia chalcone isomerase promoter (van Tunen et al. (1988) EMBO J. 7:1257-1263), bean glycine rich protein 1 promoter (Keller et al. (1989) Genes Dev. 3:1639-1646), truncated CaMV 35S promoter (O'Dell et al. (1985) Nature 313:810-812), potato patatin promoter (Wenzler et al. (1989) Plant Mol. Biol. 13:347-354), root cell promoter (Yamamoto et al. (1990) Nucleic Acids Res. 18:7449), maize zein promoter (Kriz et al. (1987)Mol. Gen. Genet. 207:90-98; Langridge et al. (1983) Cell 34:1015-1022; Reina et al. (1990) Nucleic Acids Res. 18:6425; Reina et al. (1990) Nucleic Acids Res. 18:7449; and Wandelt et al. (1989) Nucleic Acids Res. 17:2354), globulin-1 promoter (Belanger et al. (1991) Genetics 129:863-872), α-tubulin cab promoter (Sullivan et al. (1989) Mol. Gen. Genet. 215:431-440), PEPCase promoter (Hudspeth & Grula (1989) Plant Mol. Biol. 12:579-589), R gene complex-associated promoters (Chandler et al. (1989) Plant Cell 1:1175-1183), and chalcone synthase promoters (Franken et al. (1991) EMBO J. 10:2605-2612).

[0083] Useful for seed-specific expression is the pea vicilin promoter (Czako et al. (1992) Mol. Gen. Genet. 235:33-40; as well as the seed-specific promoters disclosed in U.S. Pat. No. 5,625,136. Useful promoters for expression in mature leaves are those that are switched at the onset of senescence, such as the SAG promoter from Arabidopsis (Gan et al. (1995) Science 270:1986-1988).

[0084] In addition, promoters functional in chloroplasts can be used. Non-limiting examples of such promoters include the bacteriophage T3 gene 9 5′ UTR and other promoters disclosed in U.S. Pat. No. 7,579,516. Other promoters useful with the invention include but are not limited to the S-E9 small subunit RuBP carboxylase promoter and the Kunitz trypsin inhibitor gene promoter (Kti3).

[0085] Additional regulatory elements useful with this invention include, but are not limited to, introns, enhancers, termination sequences and/or 5′ and 3′ untranslated regions.

[0086] An intron useful with this invention can be an intron identified in and isolated from a plant and then inserted into an expression cassette to be used in transformation of a plant. As would be understood by those of skill in the art, introns can comprise the sequences required for self-excision and are incorporated into nucleic acid constructs/expression cassettes in frame. An intron can be used either as a spacer to separate multiple protein-coding sequences in one nucleic acid construct, or an intron can be used inside one protein-coding sequence to, for example, stabilize the mRNA. If they are used within a protein-coding sequence, they are inserted “in-frame” with the excision sites included. Introns may also be associated with promoters to improve or modify expression. As an example, a promoter/intron combination useful with this invention includes but is not limited to that of the maize Ubi1 promoter and intron.

[0087] Non-limiting examples of introns useful with the present invention include introns from the ADHI gene (e.g., Adh1-S introns 1, 2 and 6), the ubiquitin gene (Ubi1), the RuBisCO small subunit (rbcS) gene, the RuBisCO large subunit (rbcL) gene, the actin gene (e.g., actin-1 intron), the pyruvate dehydrogenase kinase gene (pdk), the nitrate reductase gene (nr), the duplicated carbonic anhydrase gene 1 (Tdca1), the psbA gene, the atpA gene, or any combination thereof.

[0088] An “editing system” as used herein refers to any site-specific (e.g., sequence-specific) nucleic acid editing system now known or later developed, which system can introduce a modification (e.g., a mutation) in a nucleic acid in target specific manner. For example, an editing system (e.g., a site- and/or sequence-specific editing system) can include, but is not limited to, a CRISPR-Cas editing system, a meganuclease editing system, a zinc finger nuclease (ZFN) editing system, a transcription activator-like effector nuclease (TALEN) editing system, a base editing system and/or a prime editing system, each of which may comprise one or more polypeptide(s) and/or one or more polynucleotide(s) that when present and/or expressed together (e.g., as a system) in a composition and/or cell can modify (e.g., mutate) a target nucleic acid in a sequence specific manner. In some embodiments, an editing system (e.g., a site- and/or sequence-specific editing system) can comprise one or more polynucleotide(s) and/or one or more polypeptide(s), including but not limited to a nucleic acid binding domain (e.g., a DNA binding domain), a nuclease, another polypeptide, and/or a polynucleotide. In some embodiments, a CRISPR-Cas editing system is provided and/or is used that comprises an engineered protein of the present invention.

[0089] In some embodiments, an editing system comprises one or more sequence-specific nucleic acid binding polypeptide(s) (e.g., a DNA binding domains) that can be from, for example, a polynucleotide-guided endonuclease, a CRISPR-Cas endonuclease (e.g., CRISPR-Cas effector protein), a zinc finger nuclease, a transcription activator-like effector nuclease (TALEN) and/or an Argonaute protein. In some embodiments, an editing system comprises one or more cleavage polypeptide(s) (e.g., nucleases) including, but not limited to, an endonuclease (e.g., Fok1), a polynucleotide-guided endonuclease, a CRISPR-Cas endonuclease (e.g., CRISPR-Cas effector protein), a zinc finger nuclease, and/or a transcription activator-like effector nuclease (TALEN).

[0090] A “nucleic acid binding domain” as used herein refers to a polypeptide or domain that binds or is capable of binding a nucleic acid (e.g., a target nucleic acid). A DNA binding domain is an example nucleic acid binding domain and may be a site- and/or sequence-specific nucleic acid binding domain. In some embodiments, a nucleic acid binding domain may be a sequence-specific nucleic acid binding domain such as, but not limited to, a sequence-specific binding domain from, for example, a polynucleotide-guided endonuclease, a CRISPR-Cas effector protein (e.g., a CRISPR-Cas endonuclease), a zinc finger nuclease, a transcription activator-like effector nuclease (TALEN) and/or an Argonaute protein. In some embodiments, a nucleic acid binding domain comprises a cleavage domain (e.g., a nuclease domain) such as, but not limited to, an endonuclease (e.g., Fok1), a polynucleotide-guided endonuclease, a CRISPR-Cas endonuclease, a zinc finger nuclease, and/or a transcription activator-like effector nuclease (TALEN). In some embodiments, the nucleic acid binding domain is a polypeptide that can associate (e.g., form a complex) with one or more nucleic acid molecule(s) (e.g., form a complex with a guide nucleic acid as described herein) that can direct or guide the nucleic acid binding domain to a specific target nucleotide sequence (e.g., a gene locus of a genome) that is complementary to the one or more nucleic acid molecule(s) (or a portion or region thereof), thereby causing the nucleic acid binding domain to bind to the nucleotide sequence at the specific target site. In some embodiments, the nucleic acid binding domain is a CRISPR-Cas effector protein as described herein.

[0091] In some embodiments, an editing system comprises or is a ribonucleoprotein such as an assembled ribonucleoprotein complex (e.g., a ribonucleoprotein that comprises a CRISPR-Cas effector protein, a guide nucleic acid, and optionally a deaminase). In some embodiments, a ribonucleoprotein of an editing system may be assembled together (e.g., a pre-assembled ribonucleoprotein including a CRISPR-Cas effector protein, a guide nucleic acid, and optionally a deaminase) such as when contacted to a target nucleic acid or when introduced into a cell (e.g., a plant cell). In some embodiments, a ribonucleoprotein of an editing system may assemble into a complex (e.g., a covalently and/or non-covalently bound complex) while a portion of the ribonucleoprotein is contacting a target nucleic acid and/or may assemble after and/or during introduction into a plant cell. In some embodiments, an editing system may be assembled (e.g., into a covalently and/or non-covalently bound complex) when introduced into a plant cell. In some embodiments, a ribonucleoprotein may comprise an engineered protein, a guide nucleic acid, and optionally a deaminase.

[0092] The terms “transgene” or “transgenic” as used herein refer to at least one nucleic acid sequence that is taken from the genome of one organism or produced synthetically, and which is then introduced into a host cell (e.g., a plant cell) or organism or tissue of interest and which is subsequently integrated into the host's genome by means of “stable” transformation or transfection approaches. In contrast, the term “transient” transformation or transfection or introduction refers to a way of introducing molecular tools including at least one nucleic acid (DNA, RNA, single-stranded or double-stranded or a mixture thereof) and/or at least one amino acid sequence, optionally comprising suitable chemical or biological agents, to achieve a transfer into at least one compartment of interest of a cell, including, but not restricted to, the cytoplasm, an organelle, including the nucleus, a mitochondrion, a vacuole, a chloroplast, or into a membrane, resulting in transcription and/or translation and/or association and/or activity of the at least one molecule introduced without achieving a stable integration or incorporation into the genome and thus without inheritance of the respective at least one molecule introduced into the genome of a cell. The term “transgene-free” refers to a condition in which a transgene is not present or found in the genome of a host cell or tissue or organism of interest.

[0093] In some embodiments, a polynucleotide and/or a nucleic acid construct of the invention can be an “expression cassette” or can be comprised within an expression cassette. As used herein, “expression cassette” means a recombinant nucleic acid molecule comprising, for example, a nucleic acid construct of the invention (e.g., a polynucleotide encoding an engineered protein, a polynucleotide encoding a cytosine deaminase, a polynucleotide encoding an adenine deaminase, a polynucleotide encoding a deaminase fusion protein, a polynucleotide encoding a peptide tag, a polynucleotide encoding an affinity polypeptide, a polynucleotide encoding a glycosylase, and/or a polynucleotide comprising a guide nucleic acid), wherein the nucleic acid construct is operably associated with at least a control sequence (e.g., a promoter). Thus, some embodiments of the invention provide expression cassettes designed to express, for example, a nucleic acid construct of the invention. When an expression cassette comprises more than one polynucleotide, the polynucleotides may be operably linked to a single promoter that drives expression of all of the polynucleotides or the polynucleotides may be operably linked to one or more separate promoters (e.g., three polynucleotides may be driven by one, two or three promoters in any combination). Thus, for example, a polynucleotide encoding an engineered protein, a polynucleotide encoding a deaminase (e.g., an adenine deaminase), and a polynucleotide comprising a guide nucleic acid comprised in an expression cassette may each be operably associated with a single promoter or one or more of the polynucleotide(s) may be operably associated with separate promoters (e.g., two or three promoters) in any combination, which may be the same or different from each other.

[0094] In some embodiments, an expression cassette comprising the polynucleotides/nucleic acid constructs of the invention may be optimized for expression in an organism (e.g., an animal, a plant, a bacterium and the like).

[0095] An expression cassette comprising a nucleic acid construct of the invention may be chimeric, meaning that at least one of its components is heterologous with respect to at least one of its other components (e.g., a promoter from the host organism operably linked to a polynucleotide of interest to be expressed in the host organism, wherein the polynucleotide of interest is from a different organism than the host or is not normally found in association with that promoter). An expression cassette may also be one that is naturally occurring but has been obtained in a recombinant form useful for heterologous expression.

[0096] An expression cassette can optionally include a transcriptional and/or translational termination region (i.e., termination region) and/or an enhancer region that is functional in the selected host cell. A variety of transcriptional terminators and enhancers are known in the art and are available for use in expression cassettes. Transcriptional terminators are responsible for the termination of transcription and correct mRNA polyadenylation. A termination region and/or the enhancer region may be native to the transcriptional initiation region, may be native to a gene encoding a CRISPR-Cas effector protein or a gene encoding a deaminase, may be native to a host cell, or may be native to another source (e.g., foreign or heterologous to the promoter, to a gene encoding the CRISPR-Cas effector protein or a gene encoding the deaminase, to a host cell, or any combination thereof).

[0097] An expression cassette of the invention also can include a polynucleotide encoding a selectable marker, which can be used to select a transformed host cell. As used herein, “selectable marker” means a polynucleotide sequence that when expressed imparts a distinct phenotype to the host cell expressing the marker and thus allows such transformed cells to be distinguished from those that do not have the marker. Such a polynucleotide sequence may encode either a selectable or screenable marker, depending on whether the marker confers a trait that can be selected for by chemical means, such as by using a selective agent (e.g., an antibiotic and the like), or on whether the marker is simply a trait that one can identify through observation or testing, such as by screening (e.g., fluorescence). Many examples of suitable selectable markers are known in the art and can be used in the expression cassettes described herein.

[0098] The expression cassettes, the nucleic acid molecules/constructs and polynucleotide sequences described herein can be used in connection with vectors. The term “vector” refers to a composition for transferring, delivering or introducing a nucleic acid (or nucleic acids) into a cell. A vector comprises a nucleic acid construct comprising the nucleotide sequence(s) to be transferred, delivered or introduced. Vectors for use in transformation of host organisms are well known in the art. Non-limiting examples of general classes of vectors include viral vectors, plasmid vectors, phage vectors, phagemid vectors, cosmid vectors, fosmid vectors, bacteriophages, artificial chromosomes, minicircles, or Agrobacterium binary vectors in double or single stranded linear or circular form which may or may not be self transmissible or mobilizable. In some embodiments, a viral vector can include, but is not limited, to a retroviral, lentiviral, adenoviral, adeno-associated, or herpes simplex viral vector. A vector as defined herein can transform a prokaryotic or eukaryotic host either by integration into the cellular genome or exist extrachromosomally (e.g., autonomous replicating plasmid with an origin of replication). Additionally, included are shuttle vectors by which is meant a DNA vehicle capable, naturally or by design, of replication in two different host organisms, which may be selected from actinomycetes and related species, bacteria and eukaryotic (e.g., higher plant, mammalian, yeast or fungal cells). In some embodiments, the nucleic acid in the vector is under the control of, and operably linked to, an appropriate promoter or other regulatory elements for transcription in a host cell. The vector may be a bi-functional expression vector which functions in multiple hosts. In the case of genomic DNA, this may contain its own promoter and/or other regulatory elements and in the case of cDNA this may be under the control of an appropriate promoter and/or other regulatory elements for expression in the host cell. Accordingly, a nucleic acid construct of this invention and/or expression cassettes comprising the same may be comprised in vectors as described herein and as known in the art.

[0099] As used herein, “contact,” “contacting,” “contacted,” and grammatical variations thereof, refer to placing the components of a desired reaction together under conditions suitable for carrying out the desired reaction (e.g., transformation, transcriptional control, genome editing, nicking, and/or cleavage). Thus, for example, a target nucleic acid may be contacted with a nucleic acid construct of the invention encoding, for example, a nucleic acid binding domain (e.g., a DNA binding domain such as a sequence-specific DNA binding protein (e.g., a polynucleotide-guided endonuclease, a CRISPR-Cas effector protein (e.g., a CRISPR-Cas endonuclease), a zinc finger nuclease, a transcription activator-like effector nuclease (TALEN) and/or an Argonaute protein)), a guide nucleic acid, and optionally a cytosine deaminase and/or adenine deaminase under conditions whereby the nucleic acid binding domain (e.g., a CRISPR-Cas effector protein) is expressed, and the nucleic acid binding domain forms a complex with the guide nucleic acid, the complex hybridizes to the target nucleic acid, and optionally the cytosine deaminase and/or adenine deaminase is/are recruited to the nucleic acid binding domain (and thus, to the target nucleic acid) or the cytosine deaminase and/or adenine deaminase are fused to the nucleic acid binding domain, thereby modifying the target nucleic acid. In some embodiments, the cytosine deaminase and/or adenine deaminase and the nucleic acid binding domain localize at the target nucleic acid, optionally through covalent and/or non-covalent interactions.

[0100] In some embodiments, a target nucleic acid may be contacted with a nucleic acid construct of the invention encoding an engineered protein, a guide nucleic acid, and optionally a cytosine deaminase and/or adenine deaminase under conditions whereby the engineered protein is expressed, or a target nucleic acid may be contacted with an engineered protein, a guide nucleic acid, and optionally a cytosine deaminase and/or adenine deaminase. The engineered protein can form a complex with the guide nucleic acid, and the complex can hybridize to the target nucleic acid, and optionally the cytosine deaminase and/or adenine deaminase is/are recruited to the engineered protein (and thus, to the target nucleic acid) or the cytosine deaminase and/or adenine deaminase are fused to the engineered protein, thereby modifying the target nucleic acid. The cytosine deaminase and/or adenine deaminase and the engineered protein may localize at the target nucleic acid, optionally through covalent and/or non-covalent interactions.

[0101] As used herein, “modifying” or “modification” in reference to a target nucleic acid includes editing (e.g., mutating), covalent modification, exchanging/substituting nucleic acids/nucleotide bases, deleting, cleaving, and/or nicking of a target nucleic acid to thereby provide a modified nucleic acid and/or altering transcriptional control of a target nucleic acid to thereby provide a modified nucleic acid. In some embodiments, a modification may include an insertion and/or deletion of any size and/or a single base change (SNP) of any type. In some embodiments, a modification comprises a SNP. In some embodiments, a modification comprises exchanging and/or substituting one or more (e.g., 1, 2, 3, 4, 5, or more) nucleotides. In some embodiments, an insertion or deletion may be about 1 base to about 30,000 bases in length (e.g., about 1, 2, 3, 4, 5, 6, 7, 8, 9, 10, 11, 12, 13, 14, 15, 16, 17, 18, 19, 20, 21, 22, 23, 24, 25, 26, 27, 28, 29, 30, 31, 32, 33, 34, 35, 36, 37, 38, 39, 40, 41, 42, 43, 44, 45, 46, 47, 48, 49, 50, 51, 52, 53, 54, 55, 56, 57, 58, 59, 60, 61, 62, 63, 64, 65, 66, 67, 68, 69, 70, 71, 72, 73, 74, 75, 76, 77, 78, 79, 80, 81, 82, 83, 84, 85, 86, 87, 88, 89, 90, 91, 92, 93, 94, 95, 96, 97, 98, 99, 100, 110, 120, 130, 140, 150, 160, 170, 180, 190, 200, 210, 220, 230, 240, 250, 260, 270, 280, 290, 300, 310, 320, 330, 340, 350, 360, 370, 380, 390, 400, 410, 400, 410, 420, 430, 440, 450, 460, 470, 480, 490, 500, 510, 520, 530, 540, 550, 560, 570, 580, 590, 600, 610, 620, 630, 640, 650, 660, 670, 680, 690, 700, 710, 720, 730, 740, 750, 760, 770, 780, 790, 800, 810, 820, 830, 840, 850, 860, 870, 880, 890, 900, 910, 920, 930, 940, 950, 960, 970, 980, 990, 1000, 1100, 1200, 1300, 1400, 1500, 1600, 1700, 1800, 1900, 2000, 2500, 3000, 3500, 4000, 4500, 5000, 5500, 6000, 6500, 7000, 7500, 8000, 8500, 9000, 9500, 10,000, 10,500, 11,000, 11,500, 12,000, 12,500, 13,000, 13,500, 14,000, 14,500, 15,000, 15,500, 16,000, 16,500, 17,000, 17,500, 18,000, 18,500, 19,000, 19,500, 20,000, 20,500, 21,000, 21,500, 22,000, 22,500, 23,000, 23,500, 24,000, 24,500, 25,000, 25,500, 26,000, 26,500, 27,000, 27,500, 28,000, 28,500, 29,000, 29,500, 30,000 bases in length or more, or any value or range therein). Thus, in some embodiments, an insertion or deletion may be about 1, 2, 3, 4, 5, 6, 7, 8, 9, 10, 11, 12, 13, 14, 15, 16, 17, 18, 19, 20, 21, 22, 23, 24, 25, 26, 27, 28, 29, 30, 31, 32, 33, 34, 35, 36, 37, 38, 39, 40, 41, 42, 43, 44, 45, 46, 47, 48, 49, 50, 51, 52, 53, 54, 55, 56, 57, 58, 59, 60, 61, 62, 63, 64, 65, 66, 67, 68, 69, 70, 71, 72, 73, 74, 75, 76, 77, 78, 79, 80, 81, 82, 83, 84, 85, 86, 87, 88, 89, 90, 91, 92, 93, 94, 95, 96, 97, 98, 99, 100, 110, 120, 130, 140, 150, 160, 170, 180, 190, 200, 210, 220, 230, 240, 250, 260, 270, 280, 290, 300 to about 310, 320, 330, 340, 350, 360, 370, 380, 390, 400, 410, 420, 430, 440, 450, 460, 470, 480, 490, 500, 510, 520, 530, 540, 550, 560, 570, 580, 590, 600, 610, 620, 630, 640, 650, 660, 670, 680, 690, 700, 710, 720, 730, 740, 750, 760, 770, 780, 790, 800, 810, 820, 830, 840, 850, 860, 870, 880, 890, 900, 910, 920, 930, 940, 950, 960, 970, 980, 990, 1000 bases in length, or any range or value therein; about 50, 51, 52, 53, 54, 55, 56, 57, 58, 59, 60, 61, 62, 63, 64, 65, 66, 67, 68, 69, 70, 71, 72, 73, 74, 75, 76, 77, 78, 79, 80, 81, 82, 83, 84, 85, 86, 87, 88, 89, 90, 91, 92, 93, 94, 95, 96, 97, 98, 99, 100, 110, 120, 130, 140, 150, 160, 170, 180, 190, 200, 210, 220, 230, 240, 250, 260, 270, 280, 290, 300 bases to about 310, 320, 330, 340, 350, 360, 370, 380, 390, 400, 410, 420, 430, 440, 450, 460, 470, 480, 490, 500, 510, 520, 530, 540, 550, 560, 570, 580, 590, 600, 610, 620, 630, 640, 650, 660, 670, 680, 690, 700, 710, 720, 730, 740, 750, 760, 770, 780, 790, 800, 810, 820, 830, 840, 850, 860, 870, 880, 890, 900, 910, 920, 930, 940, 950, 960, 970, 980, 990, 1000, 1100, 1200, 1300, 1400, 1500, 1600, 1700, 1800, 1900, 2000 bases or more in length, or any value or range therein; about 500, 510, 520, 530, 540, 550, 560, 570, 580, 590, 600, 610, 620, 630, 640, 650, 660, 670, 680, 690, 700, 710, 720, 730, 740, 750, 760, 770, 780, 790, 800, 810, 820, 830, 840, 850, 860, 870, 880, 890, 900, 910, 920, 930, 940, 950, 960, 970, 980, 990, 1000, 1100, 1200, 1300, 1400, 1500, 1600, 1700, 1800, 1900, 2000 bases to about 2500, 3000, 3500, 4000, 4500, 5000, 5500, 6000, 6500, 7000, 7500, 8000, 8500, 9000, 9500, or 10,000 bases or more in length, or any value or range therein; or about 400, 410, 420, 430, 440, 450, 460, 470, 480, 490, 500, 510, 520, 530, 540, 550, 560, 570, 580, 590, 600, 610, 620, 630, 640, 650, 660, 670, 680, 690, or 700 bases to about 710, 720, 730, 740, 750, 760, 770, 780, 790, 800, 810, 820, 830, 840, 850, 860, 870, 880, 890, 900, 910, 920, 930, 940, 950, 960, 970, 980, 990, 1000, 1100, 1200, 1300, 1400, 1500, 1600, 1700, 1800, 1900, 2000, 2500, 3000, 3500, 4000, 4500, or 5000 bases or more in length, or any value or range therein. In some embodiments, an insertion or deletion may be about 1000, 1100, 1200, 1300, 1400, 1500, 1600, 1700, 1800, 1900, 2000, 2500, 3000, 3500, 4000, 4500, 5000, 5500, 6000, 6500, 7000, 7500, 8000, 8500, 9000, 9500, or 10,000 bases to about 10,500, 11,000, 11,500, 12,000, 12,500, 13,000, 13,500, 14,000, 14,500, 15,000, 15,500, 16,000, 16,500, 17,000, 17,500, 18,000, 18,500, 19,000, 19,500, 20,000, 20,500, 21,000, 21,500, 22,000, 22,500, 23,000, 23,500, 24,000, 24,500, 25,000, 25,500, 26,000, 26,500, 27,000, 27,500, 28,000, 28,500, 29,000, 29,500, or 30,000 bases or more in length, or any value or range therein.

[0102] “Recruit,” “recruiting” or “recruitment” as used herein refer to attracting one or more polypeptide(s) or polynucleotide(s) to another polypeptide or polynucleotide (e.g., to a particular location in a genome) using protein-protein interactions, nucleic acid protein interactions (e.g., RNA-protein interactions), and/or chemical interactions. Protein-protein interactions can include, but are not limited to, peptide tags (epitopes, multimerized epitopes) and corresponding affinity polypeptides, RNA recruiting motifs and corresponding affinity polypeptides, and/or chemical interactions. Example chemical interactions that may be useful with polypeptides and polynucleotides for the purpose of recruitment can include, but are not limited to, rapamycin-inducible dimerization of FRB-FKBP; Biotin-streptavidin interaction; SNAP tag (Hussain et al. Curr Pharm Des. 19(30):5437-42 (2013)); Halo tag (Los et al. ACS Chem Biol. 3(6):373-82 (2008)); CLIP tag (Gautier et al. Chemistry & Biology 15:128-136 (2008)); DmrA-DmrC heterodimer induced by a compound (Tak et al. Nat Methods 14(12):1163-1166 (2017)); Bifunctional ligand approaches (fuse two protein-binding chemicals together) (Voi et al. Curr Opin Chemical Biology 28:194-201 (2015)) (e.g. dihyrofolate reductase (DHFR) (Kopyteck et al. Cell Chem Biol 7(5):313-321 (2000)).

[0103] “Introducing,” “introduce,” “introduced” (and grammatical variations thereof) in the context of a polynucleotide of interest or editing system means presenting a nucleotide sequence of interest (e.g., polynucleotide, a nucleic acid construct, and/or a guide nucleic acid) and/or editing system (e.g., a polynucleotide, polypeptide, and/or ribonucleoprotein) to a host organism or cell of said organism (e.g., host cell; e.g., a plant cell) in such a manner that the nucleotide sequence and/or editing system gains access to the interior of a cell. Thus, for example, a nucleic acid construct of the invention encoding an engineered protein, a guide nucleic acid, and a cytosine deaminase and/or adenine deaminase may be introduced into a cell of an organism, thereby transforming the cell with the engineered protein, a guide nucleic acid, and a cytosine deaminase and/or adenine deaminase. In some embodiments, an engineered protein and/or a guide nucleic acid may be introduced into a cell of an organism, optionally wherein the engineered protein and guide nucleic acid may be comprised in a complex (e.g., a ribonucleoprotein). In some embodiments, the organism is a eukaryote (e.g., a mammal such as a human).

[0104] The term “transformation” as used herein refers to the introduction of a heterologous nucleic acid, polypeptide, and/or ribonucleoprotein into a cell. Transformation of a cell may be stable or transient. Thus, in some embodiments, a host cell or host organism may be stably transformed with a polynucleotide/nucleic acid molecule of the invention. In some embodiments, a host cell or host organism may be transiently transformed with a nucleic acid construct, a polypeptide, and/or a ribonucleoprotein of the invention.

[0105] “Transient transformation” in the context of a polynucleotide, polypeptide, and/or ribonucleoprotein means that a polynucleotide, polypeptide, and/or ribonucleoprotein is introduced into the cell and does not integrate into the genome of the cell.

[0106] By “stably introducing” or “stably introduced” in the context of a polynucleotide introduced into a cell is intended that the introduced polynucleotide is stably incorporated into the genome of the cell, and thus the cell is stably transformed with the polynucleotide.

[0107] “Stable transformation” or “stably transformed” as used herein means that a nucleic acid molecule is introduced into a cell and integrates into the genome of the cell. As such, the integrated nucleic acid molecule is capable of being inherited by the progeny thereof, more particularly, by the progeny of multiple successive generations. “Genome” as used herein includes the nuclear and the plastid genome, and therefore includes integration of the nucleic acid into, for example, the chloroplast or mitochondrial genome. Stable transformation as used herein can also refer to a transgene that is maintained extrachromosomally, for example, as a minichromosome or a plasmid.

[0108] Transient transformation may be detected by, for example, an enzyme-linked immunosorbent assay (ELISA) or Western blot, which can detect the presence of a peptide or polypeptide encoded by one or more transgene introduced into an organism. Stable transformation of a cell can be detected by, for example, a Southern blot hybridization assay of genomic DNA of the cell with nucleic acid sequences which specifically hybridize with a nucleotide sequence of a transgene introduced into an organism (e.g., a plant). Stable transformation of a cell can be detected by, for example, a Northern blot hybridization assay of RNA of the cell with nucleic acid sequences which specifically hybridize with a nucleotide sequence of a transgene introduced into a host organism. Stable transformation of a cell can also be detected by, e.g., a polymerase chain reaction (PCR) or other amplification reactions as are well known in the art, employing specific primer sequences that hybridize with target sequence(s) of a transgene, resulting in amplification of the transgene sequence, which can be detected according to standard methods. Transformation can also be detected by direct sequencing and/or hybridization protocols well known in the art.

[0109] Accordingly, in some embodiments, nucleotide sequences, polynucleotides, nucleic acid constructs, and/or expression cassettes of the invention may be expressed transiently and/or they can be stably incorporated into the genome of the host organism. Thus, in some embodiments, a nucleic acid construct of the invention may be transiently introduced into a cell with a guide nucleic acid and as such, no DNA maintained in the cell.

[0110] A nucleic acid construct, polypeptide, and/or ribonucleoprotein of the invention can be introduced into a cell by any method known to those of skill in the art. In some embodiments, transformation methods include, but are not limited to, transformation via bacterial-mediated nucleic acid delivery (e.g., via Agrobacteria), viral-mediated nucleic acid delivery, silicon carbide and/or nucleic acid whisker-mediated nucleic acid delivery, liposome mediated nucleic acid delivery, microinjection, microparticle bombardment, calcium-phosphate-mediated transformation, cyclodextrin-mediated transformation, electroporation, nanoparticle-mediated transformation, sonication, infiltration, PEG-mediated nucleic acid uptake, as well as any other electrical, chemical, physical (mechanical) and/or biological mechanism that results in the introduction of nucleic acid into the cell (e.g., a plant cell or an animal cell), including any combination thereof. In some embodiments of the invention, transformation of a cell comprises nuclear transformation. In some embodiments, transformation of a cell comprises plastid transformation (e.g., chloroplast transformation). In some embodiments, a recombinant nucleic acid construct of the invention can be introduced into a cell via conventional breeding techniques.

[0111] Procedures for transforming both eukaryotic and prokaryotic organisms are well known and routine in the art and are described throughout the literature (See, for example, Jiang et al. 2013. Nat. Biotechnol. 31:233-239; Ran et al. Nature Protocols 8:2281-2308 (2013)). General guides to various plant transformation methods known in the art include Miki et al. (“Procedures for Introducing Foreign DNA into Plants” in Methods in Plant Molecular Biology and Biotechnology, Glick, B. R. and Thompson, J. E., Eds. (CRC Press, Inc., Boca Raton, 1993), pages 67-88) and Rakowoczy-Trojanowska (Cell. Mol. Biol. Lett. 7:849-858 (2002)).

[0112] A nucleotide sequence, polypeptide, and/or ribonucleoprotein therefore can be introduced into a host organism or its cell in any number of ways that are well known in the art. The methods of the invention do not depend on a particular method for introducing one or more nucleotide sequence(s), polypeptide(s), and/or ribonucleoprotein(s) into the organism, only that they gain access to the interior of at least one cell of the organism. Where more than one nucleotide sequence, polypeptide, and/or ribonucleoprotein is to be introduced, they can be assembled as part of a single nucleic acid construct, or as separate nucleic acid constructs, and can be located on the same or different nucleic acid constructs. Accordingly, a nucleotide sequence, polypeptide, and/or ribonucleoprotein can be introduced into the cell of interest in a single transformation event, and/or in separate transformation events, or, alternatively, where relevant, a nucleotide sequence can be incorporated into a plant, for example, as part of a breeding protocol. In some embodiments, the cell is a eukaryotic cell (e.g., a mammalian such as a human cell or a plant cell).

[0113] In some embodiments, a nucleic acid construct of the invention (e.g., a polynucleotide encoding an engineered protein of the present invention, a polynucleotide encoding a deaminase, and/or a guide nucleic acid and/or expression cassettes and/or vectors comprising the same) may be operably linked to at least one regulatory sequence, optionally, wherein the at least one regulatory sequence may be codon optimized for expression in a plant. In some embodiments, the at least one regulatory sequence may be, for example, a promoter, an operon, a terminator, or an enhancer. In some embodiments, the at least one regulatory sequence may be a promoter. In some embodiments, the regulatory sequence may be an intron. In some embodiments, the at least one regulatory sequence may be, for example, a promoter operably associated with an intron or a promoter region comprising an intron. In some embodiments, the at least one regulatory sequence may be, for example a ubiquitin promoter and its associated intron (e.g., Medicago truncatula and/or Zea mays and their associated introns). In some embodiments, the at least one regulatory sequence may be a terminator nucleotide sequence and/or an enhancer nucleotide sequence.

[0114] In some embodiments, a nucleic acid construct of the invention may be operably associated with a promoter region, wherein the promoter region comprises an intron, optionally wherein the promoter region may be a ubiquitin promoter and intron (e.g., a Medicago or a maize ubiquitin promoter and intron, e.g., SEQ ID NO:48 or SEQ ID NO:49). In some embodiments, the nucleic acid construct of the invention that is operably associated with a promoter region comprising an intron may be codon optimized for expression in a plant.

[0115] In some embodiments, a nucleic acid construct of the invention may encode one or more (e.g., 1, 2, 3, 4, or more) polypeptide(s) of interest, optionally wherein the one or more polypeptides of interest may be codon optimized for expression in a plant. In some embodiments, an engineered protein may comprise to one or more (e.g., 1, 2, 3, 4, or more) polypeptide(s) of interest. For example, the heterologous polypeptide of an engineered protein may comprise or be a polypeptide of interest.

[0116] A polypeptide of interest useful with this invention can include, but is not limited to, a polypeptide or protein domain having deaminase activity, nickase activity, recombinase activity, transposase activity, methylase activity, glycosylase (DNA glycosylase) activity, glycosylase inhibitor activity (e.g., uracil-DNA glycosylase inhibitor (UGI)), demethylase activity, transcription activation activity, transcription repression activity, transcription release factor activity, histone modification activity, nuclease activity, single-strand RNA cleavage activity, double-strand RNA cleavage activity, restriction endonuclease activity (e.g., Fok1), nucleic acid binding activity, methyltransferase activity, DNA repair activity, DNA damage activity, dismutase activity, alkylation activity, depurination activity, oxidation activity, pyrimidine dimer forming activity, integrase activity, transposase activity, polymerase activity, ligase activity, helicase activity, a nuclear localization sequence or activity, an affinity polypeptide, a peptide tag, and/or photolyase activity. In some embodiments, the polypeptide of interest is a Fok1 nuclease, or a uracil-DNA glycosylase inhibitor. When encoded in a nucleic acid (polynucleotide, expression cassette, and/or vector) the encoded polypeptide or protein domain may be codon optimized for expression in an organism. In some embodiments, a polypeptide of interest may be linked to an engineered protein of the present invention or CRISPR-Cas effector protein domain to provide a CRISPR-Cas fusion protein. In some embodiments, a CRISPR-Cas fusion protein that comprises a CRISPR-Cas effector protein domain linked to a peptide tag may also be linked to a polypeptide of interest (e.g., a CRISPR-Cas effector protein domain may be, for example, linked to both a peptide tag (or an affinity polypeptide) and, for example, a polypeptide of interest.

[0117] In some embodiments, an editing system of the present invention comprises a CRISPR-Cas effector protein. As used herein, a “CRISPR-Cas effector protein” is a protein or polypeptide that cleaves, cuts, or nicks a nucleic acid; binds a nucleic acid (e.g., a target nucleic acid and/or a guide nucleic acid); and/or that identifies, recognizes, or binds a guide nucleic acid as defined herein. In some embodiments, a CRISPR-Cas effector protein may be an enzyme (e.g., a nuclease, endonuclease, nickase, etc.) and/or may function as an enzyme. In some embodiments, a CRISPR-Cas effector protein refers to a CRISPR-Cas nuclease. In some embodiments, a CRISPR-Cas effector protein comprises nuclease activity and/or nickase activity, comprises a nuclease domain whose nuclease activity and/or nickase activity has been reduced or eliminated, comprises single stranded DNA cleavage activity (ss DNAse activity) or which has ss DNAse activity that has been reduced or eliminated, and/or comprises self-processing RNAse activity or which has self-processing RNAse activity that has been reduced or eliminated. A CRISPR-Cas effector protein may bind to a target nucleic acid. A CRISPR-Cas effector protein may be a Type I, II, III, IV, V, or VI CRISPR-Cas effector protein. In some embodiments, a CRISPR-Cas effector protein may be from a Type I CRISPR-Cas system, a Type II CRISPR-Cas system, a Type III CRISPR-Cas system, a Type IV CRISPR-Cas system, Type V CRISPR-Cas system, or a Type VI CRISPR-Cas system. In some embodiments, a CRISPR-Cas effector protein of the invention may be from a Type II CRISPR-Cas system or a Type V CRISPR-Cas system. In some embodiments, a CRISPR-Cas effector protein may be a Type II CRISPR-Cas effector protein, for example, a Cas9 effector protein. In some embodiments, a CRISPR-Cas effector protein may be Type V CRISPR-Cas effector protein, for example, a Cas12 effector protein. In some embodiments, a CRISPR-Cas effector protein may be Cas12a and optionally may have an amino acid sequence of any one of SEQ ID NOs:50-66 and/or a nucleotide sequence of any one of SEQ ID NOs:67-69. In some embodiments, a CRISPR-Cas effector protein may be an active Cas12a and optionally may have an amino acid sequence of SEQ ID NO:58. In some embodiments, a CRISPR-Cas effector protein may be an inactive (i.e., dead) Cas12a and optionally may have an amino acid sequence of SEQ ID NO:50. In some embodiments, a CRISPR-Cas effector protein may be Cas12b and optionally may have an amino acid sequence of SEQ ID NO:151.

[0118] Exemplary CRISPR-Cas effector proteins include, but are not limited to, a Cas9, C2c1, C2c3, Cas12a (also referred to as Cpf1), Cas12b, Cas12c, Cas12d, Cas12e, Cas13a, Cas13b, Cas13c, Cas13d, Casl, CaslB, Cas2, Cas3, Cas3′, Cas3″, Cas4, Cas5, Cas6, Cas7, Cas8, Cas9 (also known as Csnl and Csx12), Cas10, Csyl, Csy2, Csy3, Csel, Cse2, Cscl, Csc2, Csa5, Csn2, Csm2, Csm3, Csm4, Csm5, Csm6, Cmrl, Cmr3, Cmr4, Cmr5, Cmr6, Csbl, Csb2, Csb3, Csxl7, Csxl4, Csx10, Csx16, CsaX, Csx3, Csxl, Csxl5, Csfl, Csf2, Csf3, Csf4 (dinG), and/or Csf5 nuclease, optionally wherein the CRISPR-Cas effector protein may be a Cas9, Cas12a (Cpf1), Cas12b, Cas12c (C2c3), Cas12d (CasY), Cas12e (CasX), Cas12g, Cas12h, Cas12i, C2c4, C2c5, C2c8, C2c9, C2c10, Cas14a, Cas14b, and/or Cas14c effector protein.

[0119] In some embodiments, a CRISPR-Cas effector protein useful with the invention may comprise a mutation in its nuclease active site and/or nuclease domain (e.g., RuvC, HNH, e.g., a RuvC site of a Cas12a nuclease domain; e.g., a RuvC site and/or HNH site of a Cas9 nuclease domain). A CRISPR-Cas effector protein having a mutation in its nuclease active site and/or nuclease domain, and therefore, no longer comprising nuclease activity, is commonly referred to as “inactive” or “dead,” e.g., dCas9. In some embodiments, a CRISPR-Cas effector protein having a mutation in its nuclease active site and/or nuclease domain may have impaired activity or reduced activity (e.g., nickase activity) as compared to the same CRISPR-Cas effector protein without the mutation.

[0120] A CRISPR Cas9 effector protein or Cas9 useful with this invention may be any known or later identified Cas9 nuclease. In some embodiments, a Cas9 of the present invention may be a protein from, for example, Streptococcus spp. (e.g., S. pyogenes, S. thermophilus), Lactobacillus spp., Bifidobacterium spp., Kandleria spp., Leuconostoc spp., Oenococcus spp., Pediococcus spp., Weissella spp., and/or Olsenella spp. In some embodiments, a CRISPR-Cas effector protein may be a Cas9 and optionally may have a nucleotide sequence of any one of SEQ ID NOs:70-80 or 140-143 and/or an amino acid sequence of any one of SEQ ID NOs:81-82.

[0121] In some embodiments, the CRISPR-Cas effector protein may be a Cas9 derived from Streptococcus pyogenes and/or may recognize the PAM sequence motif NGG, NAG, NGA (Mali et al, Science 2013; 339(6121): 823-826). In some embodiments, the CRISPR-Cas effector protein may be a Cas9 derived from Streptococcus thermophiles and/or may recognize the PAM sequence motif NGGNG and/or NNAGAAW (W=A or T) (See, e.g., Horvath et al, Science, 2010; 327(5962): 167-170, and Deveau et al, J Bacteriol 2008; 190(4): 1390-1400). In some embodiments, the CRISPR-Cas effector protein may be a Cas9 derived from Streptococcus mutans and/or may recognize the PAM sequence motif NGG and/or NAAR (R=A or G) (See, e.g., Deveau et al, J BACTERIOL 2008; 190(4): 1390-1400). In some embodiments, the CRISPR-Cas effector protein may be a Cas9 derived from Streptococcus aureus and/or may recognize the PAM sequence motif NNGRR (R=A or G). In some embodiments, the CRISPR-Cas effector protein may be a Cas9 derived from S. aureus and/or may recognize the PAM sequence motif N GRRT (R=A or G). In some embodiments, the CRISPR-Cas effector protein may be a Cas9 derived from S. aureus and/or may recognize the PAM sequence motif N GRRV (R=A or G). In some embodiments, the CRISPR-Cas effector protein may be a Cas9 that is derived from Neisseria meningitidis and/or may recognize the PAM sequence motif N GATT or N GCTT (R=A or G, V=A, G or C) (See, e.g., Hou et ah, PNAS 2013, 1-6). In the aforementioned embodiments in this paragraph, N in the PAM sequence motif can be any nucleotide residue, e.g., any of A, G, C or T. In some embodiments, the CRISPR-Cas effector protein may be a Cas13a derived from Leptotrichia shahii and/or may recognize a protospacer flanking sequence (PFS) (or RNA PAM (rPAM)) sequence motif of a single 3′ A, U, or C, which may be located within the target nucleic acid.

[0122] A Type V CRISPR-Cas effector protein useful with embodiments of the invention may be any Type V CRISPR-Cas nuclease. Exemplary Type V CRISPR-Cas effector proteins include, but are not limited, to Cas12a (Cpf1), Cas12b, Cas12c (C2c3), Cas12d (CasY), Cas12e (CasX), Cas12g, Cas12h, Cas12i, C2c1, C2c4, C2c5, C2c8, C2c9, C2c10, Cas14a, Cas14b, and/or Cas14c nuclease. In some embodiments, a Type V CRISPR-Cas effector protein may be a Cas12a. In some embodiments, a Type V CRISPR-Cas effector protein may be a nickase, optionally, a Cas12a nickase. In some embodiments, a Type V CRISPR-Cas effector protein may be a Cas12b (e.g., SEQ ID NO:151).

[0123] In some embodiments, the CRISPR-Cas effector protein may be a Type V Clustered Regularly Interspaced Short Palindromic Repeats (CRISPR)-Cas nuclease. Cas12a differs in several respects from the more well-known Type II CRISPR Cas9 nuclease. For example, Cas9 recognizes a G-rich protospacer-adjacent motif (PAM) that is 3′ to its guide RNA (gRNA, sgRNA, crRNA, crDNA, CRISPR array) binding site (protospacer, target nucleic acid, target DNA) (3′-NGG), while Cas12a recognizes a T-rich PAM that is located 5′ to the target nucleic acid (5′-TTN, 5′-TTTN. In fact, the orientations in which Cas9 and Cas12a bind their guide RNAs are very nearly reversed in relation to their N and C termini. Furthermore, Cas12a enzymes use a single guide RNA (gRNA, CRISPR array, crRNA) rather than the dual guide RNA (sgRNA (e.g., crRNA and tracrRNA)) found in natural Cas9 systems, and Cas12a processes its own gRNAs. Additionally, Cas12a nuclease activity produces staggered DNA double stranded breaks instead of blunt ends produced by Cas9 nuclease activity, and Cas12a relies on a single RuvC domain to cleave both DNA strands, whereas Cas9 utilizes an HNH domain and a RuvC domain for cleavage.

[0124] A CRISPR Cas12a effector protein useful with this invention may be any known or later identified Cas12a (previously known as Cpf1) (see, e.g., U.S. Pat. No. 9,790,490, which is incorporated by reference for its disclosures of Cpf1 (Cas12a) sequences). The term “Cas12a” refers to an RNA-guided protein that can have nuclease activity, the protein comprising a guide nucleic acid binding domain and an active, inactive, or partially active DNA cleavage domain, thereby the RNA-guided nuclease activity of the Cas12a may be active, inactive or partially active, respectively. In some embodiments, a Cas12a useful with the invention may comprise a mutation in the nuclease active site (e.g., RuvC site of the Cas12a domain). A Cas12a having a mutation in its nuclease domain and/or nuclease active site, and therefore, no longer comprising nuclease activity, is commonly referred to as deadCas12a (e.g., dCas12a). In some embodiments, a Cas12a having a mutation in its nuclease domain and/or nuclease active site may have impaired activity, e.g., may have reduced nickase activity.

[0125] In some embodiments, a CRISPR-Cas effector protein may be optimized for expression in an organism, for example, in an animal (e.g., a mammal such as a human), a plant, a fungus, an archaeon, or a bacterium. In some embodiments, a CRISPR-Cas effector protein (e.g., Cas12a polypeptide/domain or a Cas9 polypeptide/domain) may be optimized for expression in a plant.

[0126] Any deaminase domain/polypeptide useful for base editing may be used with this invention. A “cytosine deaminase” and “cytidine deaminase” as used herein refer to a polypeptide or domain thereof that catalyzes or is capable of catalyzing cytosine deamination in that the polypeptide or domain catalyzes or is capable of catalyzing the removal of an amine group from a cytosine base. Thus, a cytosine deaminase may result in conversion of cytosine to a thymidine (through a uracil intermediate), causing a C to T conversion, or a G to A conversion in the complementary strand in the genome. Thus, in some embodiments, the cytosine deaminase encoded by the polynucleotide of the invention generates a C→T conversion in the sense (e.g., “+”; template) strand of the target nucleic acid or a G→A conversion in antisense (e.g., “−”, complementary) strand of the target nucleic acid. In some embodiments, a cytosine deaminase encoded by a polynucleotide of the invention generates a C to T, G, or A conversion in the complementary strand in the genome.

[0127] A cytosine deaminase useful with this invention may be any known or later identified cytosine deaminase from any organism (see, e.g., U.S. Pat. No. 10,167,457 and Thuronyi et al. Nat. Biotechnol. 37:1070-1079 (2019), each of which is incorporated by reference herein for its disclosure of cytosine deaminases). Cytosine deaminases can catalyze the hydrolytic deamination of cytidine or deoxycytidine to uridine or deoxyuridine, respectively. Thus, in some embodiments, a deaminase or deaminase domain useful with this invention may be a cytidine deaminase domain, catalyzing the hydrolytic deamination of cytosine to uracil. In some embodiments, a cytosine deaminase may be a variant of a naturally-occurring cytosine deaminase, including, but not limited to, a primate (e.g., a human, monkey, chimpanzee, gorilla), a dog, a cow, a rat or a mouse. Thus, in some embodiments, an cytosine deaminase useful with the invention may be about 70% to about 100% identical to a wild-type cytosine deaminase (e.g., about 70%, 71%, 72%, 73%, 74%, 75%, 76%, 77%, 78%, 79%, 80%, 81%, 82%, 83%, 84%, 85%, 86%, 87%, 88%, 89%, 90%, 91%, 92%, 93%, 94%, 95%, 96%, 97%, 98%, 99%, or 100% identical, and any range or value therein, to a naturally occurring cytosine deaminase).

[0128] In some embodiments, a cytosine deaminase useful with the invention may be an apolipoprotein B mRNA-editing complex (APOBEC) family deaminase. In some embodiments, the cytosine deaminase may be an APOBEC1 deaminase, an APOBEC2 deaminase, an APOBEC3A deaminase, an APOBEC3B deaminase, an APOBEC3C deaminase, an APOBEC3D deaminase, an APOBEC3F deaminase, an APOBEC3G deaminase, an APOBEC3H deaminase, an APOBEC4 deaminase, a human activation induced deaminase (hAID), an rAPOBEC1, FERNY, and/or a CDA1, optionally a pmCDA1, an atCDAI (e.g., At2g19570), and evolved versions of the same. Evolved deaminases are disclosed in, for example, U.S. Pat. No. 10,113,163, Gaudelli et al. Nature 551(7681):464-471 (2017)) and Thuronyi et al. (Nature Biotechnology 37: 1070-1079 (2019)), each of which are incorporated by reference herein for their disclosure of deaminases and evolved deaminases. In some embodiments, the cytosine deaminase may be an APOBEC1 deaminase having the amino acid sequence of SEQ ID NO:83. In some embodiments, the cytosine deaminase may be an APOBEC3A deaminase having the amino acid sequence of SEQ ID NO:84. In some embodiments, the cytosine deaminase may be an CDA1 deaminase, optionally a CDA1 having the amino acid sequence of SEQ ID NO:85. In some embodiments, the cytosine deaminase may be a FERNY deaminase, optionally a FERNY having the amino acid sequence of SEQ ID NO:86. In some embodiments, the cytosine deaminase may be a rAPOBEC1 deaminase, optionally a rAPOBEC1 deaminase having the amino acid sequence of SEQ ID NO:87. In some embodiments, the cytosine deaminase may be a hAID deaminase, optionally a hAID having the amino acid sequence of SEQ ID NO:88 or SEQ ID NO:89. In some embodiments, a cytosine deaminase useful with the invention may be about 70% to about 100% identical (e.g., 70%, 71%, 72%, 73%, 74%, 75%, 76%, 77%, 78%, 79%, 80%, 81%, 82%, 83%, 84%, 85%, 86%, 87%, 88%, 89%, 90%, 91%, 92%, 93%, 94%, 95%, 96%, 97%, 98%, 99%, 99.5% or 100% identical) to the amino acid sequence of a naturally occurring cytosine deaminase (e.g., “evolved deaminases”) (see, e.g., SEQ ID NO:90, SEQ ID NO:91, SEQ ID NO:92). In some embodiments, a cytosine deaminase useful with the invention may be about 70% to about 99.5% identical (e.g., about 70%, 71%, 72%, 73%, 74%, 75%, 76%, 77%, 78%, 79%, 80%, 81%, 82%, 83%, 84%, 85%, 86%, 87%, 88%, 89%, 90%, 91%, 92%, 93%, 94%, 95%, 96%, 97%, 98%, 99%, or 99.5% identical) to the amino acid sequence of any one of SEQ ID NOs:83-92 (e.g., at least 80%, at least 85%, at least 90%, at least 92%, at least 95%, at least 96%, at least 97%, at least 98%, at least 99%, or at least 99.5% identical to the amino acid sequence of any one of SEQ ID NOs:83-92). In some embodiments, a polynucleotide encoding a cytosine deaminase may be codon optimized for expression in a plant and the codon optimized polypeptide may be about 70% to 99.5% identical to the reference polynucleotide.

[0129] An “adenine deaminase” and “adenosine deaminase” as used herein refer to a polypeptide or domain thereof that catalyzes or is capable of catalyzing the hydrolytic deamination (e.g., removal of an amine group from adenine) of adenine or adenosine. In some embodiments, an adenine deaminase may catalyze the hydrolytic deamination of adenosine or deoxyadenosine to inosine or deoxyinosine, respectively. In some embodiments, the adenosine deaminase may catalyze the hydrolytic deamination of adenine or adenosine in DNA. In some embodiments, an adenine deaminase encoded by a nucleic acid construct of the invention may generate an A-G conversion in the sense (e.g., “+”; template) strand of the target nucleic acid or a T-C conversion in the antisense (e.g., “−”, complementary) strand of the target nucleic acid. An adenine deaminase useful with this invention may be any known or later identified adenine deaminase from any organism (see, e.g., U.S. Pat. No. 10,113,163, which is incorporated by reference herein for its disclosure of adenine deaminases).

[0130] In some embodiments, an adenosine deaminase may be a variant of a naturally-occurring adenine deaminase. Thus, in some embodiments, an adenosine deaminase may be about 70% to 100% identical to a wild-type adenine deaminase (e.g., about 70%, 71%, 72%, 73%, 74%, 75%, 76%, 77%, 78%, 79%, 80%, 81%, 82%, 83%, 84%, 85%, 86%, 87%, 88%, 89%, 90%, 91%, 92%, 93%, 94%, 95%, 96%, 97%, 98%, 99%, or 100% identical, and any range or value therein, to a naturally occurring adenine deaminase). In some embodiments, the deaminase or deaminase does not occur in nature and may be referred to as an engineered, mutated or evolved adenosine deaminase. Thus, for example, an engineered, mutated or evolved adenine deaminase polypeptide or an adenine deaminase domain may be about 70% to 99.9% identical to a naturally occurring adenine deaminase polypeptide/domain (e.g., about 70%, 71%, 72%, 73%, 74%, 75%, 76%, 77%, 78%, 79%, 80%, 81%, 82%, 83%, 84%, 85%, 86%, 87%, 88%, 89%, 90%, 91%, 92%, 93%, 94%, 95%, 96%, 97%, 98%, 99%, 99.1%, 99.2%, 99.3%, 99.4%, 99.5%, 99.6%, 99.7%, 99.8% or 99.9% identical, and any range or value therein, to a naturally occurring adenine deaminase polypeptide or adenine deaminase domain). In some embodiments, the adenosine deaminase may be from a bacterium, (e.g., Escherichia coli, Staphylococcus aureus, Haemophilus influenzae, Caulobacter crescentus, and the like). In some embodiments, a polynucleotide encoding an adenine deaminase polypeptide/domain may be codon optimized for expression in a plant.

[0131] In some embodiments, an adenine deaminase domain may be a wild-type tRNA-specific adenosine deaminase domain, e.g., a tRNA-specific adenosine deaminase (TadA) and/or a mutated/evolved adenosine deaminase domain, e.g., mutated/evolved tRNA-specific adenosine deaminase domain (TadA*). In some embodiments, a TadA domain may be from E. coli. In some embodiments, the TadA may be modified, e.g., truncated, missing one or more N-terminal and/or C-terminal amino acids relative to a full-length TadA (e.g., 1, 2, 3, 4, 5, 6, 7, 8, 9, 10, 11, 12, 13, 14, 15, 6, 17, 18, 19, or 20 N-terminal and/or C terminal amino acid residues may be missing relative to a full length TadA. In some embodiments, a TadA polypeptide or TadA domain does not comprise an N-terminal methionine. In some embodiments, a wild-type E. coli TadA comprises the amino acid sequence of SEQ ID NO:93. In some embodiments, a mutated/evolved E. coli TadA* comprises the amino acid sequence of any one of SEQ ID NOs:94-97. In some embodiments, a polynucleotide encoding a TadA/TadA* may be codon optimized for expression in a plant. In some embodiments, an adenine deaminase may comprise all or a portion of an amino acid sequence of any one of SEQ ID NOs:98-103. In some embodiments, an adenine deaminase may comprise all or a portion of an amino acid sequence of any one of SEQ ID NOs:93-103.

[0132] In some embodiments, a nucleic acid construct of this invention may further encode a glycosylase inhibitor (e.g., a uracil glycosylase inhibitor (UGI) such as uracil-DNA glycosylase inhibitor). In some embodiments, the invention provides fusion proteins comprising an engineered protein and a UGI and/or one or more polynucleotides encoding the same, optionally wherein the one or more polynucleotides may be codon optimized for expression in a plant.

[0133] A “uracil glycosylase inhibitor” useful with the invention may be any protein or polypeptide that is capable of inhibiting a uracil-DNA glycosylase base-excision repair enzyme. In some embodiments, a UGI domain comprises a wild-type UGI or a fragment thereof. In some embodiments, a UGI domain useful with the invention may be about 70% to about 100% identical (e.g., 70%, 71%, 72%, 73%, 74%, 75%, 76%, 77%, 78%, 79%, 80%, 81%, 82%, 83%, 84%, 85%, 86%, 87%, 88%, 89%, 90%, 91%, 92%, 93%, 94%, 95%, 96%, 97%, 98%, 99%, 99.5% or 100% identical and any range or value therein) to the amino acid sequence of a naturally occurring UGI domain. In some embodiments, a UGI domain may comprise the amino acid sequence of SEQ ID NO:104 or a polypeptide having about 70% to about 99.5% identity to the amino acid sequence of SEQ ID NO:104 (e.g., at least 80%, at least 85%, at least 90%, at least 92%, at least 95%, at least 96%, at least 97%, at least 98%, at least 99%, or at least 99.5% identical to the amino acid sequence of SEQ ID NO:104). For example, in some embodiments, a UGI domain may comprise a fragment of the amino acid sequence of SEQ ID NO:104 that is 100% identical to a portion of consecutive nucleotides (e.g., 10, 15, 20, 25, 30, 35, 40, 45, 50, 55, 60, 65, 70, 75, 80 consecutive nucleotides; e.g., about 10, 15, 20, 25, 30, 35, 40, 45, to about 50, 55, 60, 65, 70, 75, 80 consecutive nucleotides) of the amino acid sequence of SEQ ID NO:104. In some embodiments, a UGI domain may be a variant of a known UGI (e.g., SEQ ID NO:104) having about 70% to about 99.5% identity (e.g., 70%, 71%, 72%, 73%, 74%, 75%, 76%, 77%, 78%, 79%, 80%, 81%, 82%, 83%, 84%, 85%, 86%, 87%, 88%, 89%, 90%, 91%, 92%, 93%, 94%, 95%, 96%, 97%, 98%, 99%, 99.5% identity, and any range or value therein) to the known UGI. In some embodiments, a polynucleotide encoding a UGI may be codon optimized for expression in a plant (e.g., a plant) and the codon optimized polypeptide may be about 70% to about 99.5% identical to the reference polynucleotide.

[0134] An engineered protein may be used in combination with a guide nucleic acid (e.g., guide RNA (gRNA), CRISPR array, CRISPR RNA, crRNA) that is designed to function with the engineered protein to modify a target nucleic acid. A guide nucleic acid useful with this invention may comprise at least one spacer sequence and at least one repeat sequence. The guide nucleic acid is capable of forming a complex with the engineered protein (e.g., with a nuclease domain of the engineered protein) and the spacer sequence is capable of hybridizing to a target nucleic acid, thereby guiding the complex to the target nucleic acid, wherein the target nucleic acid may be modified (e.g., cleaved or edited) and/or modulated (e.g., modulating transcription) by a deaminase (e.g., a cytosine deaminase and/or adenine deaminase, optionally present in and/or recruited to the complex).

[0135] In some embodiments, an engineered protein comprising a Cas9 domain (or a nucleic acid construct encoding the same) may be used in combination with a Cas9 guide nucleic acid to modify a target nucleic acid, and a deaminase (e.g., cytosine and/or adenine) may be linked to or form a complex with the engineered protein. A cytosine deaminase deaminates a cytosine base in the target nucleic acid, thereby editing the target nucleic acid. An adenine deaminase deaminates an adenosine base in the target nucleic acid, thereby editing the target nucleic acid.

[0136] Likewise, an engineered protein may comprise a Cas12a domain (or other selected CRISPR-Cas nuclease, e.g., C2c1, C2c3, Cas12b, Cas12c, Cas12d, Cas12e, Cas13a, Cas13b, Cas13c, Cas13d, Casl, CaslB, Cas2, Cas3, Cas3′, Cas3″, Cas4, Cas5, Cas6, Cas7, Cas8, Cas9 (also known as Csnl and Csxl2), Cas10, Csyl, Csy2, Csy3, Csel, Cse2, Cscl, Csc2, Csa5, Csn2, Csm2, Csm3, Csm4, Csm5, Csm6, Cmrl, Cmr3, Cmr4, Cmr5, Cmr6, Csbl, Csb2, Csb3, Csxl7, Csxl4, Csx10, Csx16, CsaX, Csx3, Csxl, Csxl5, Csfl, Csf2, Csf3, Csf4 (dinG), and/or Csf5), which may form a complex with or be linked to a cytosine deaminase domain and/or adenine deaminase domain, and may be used in combination with a Cas12a guide nucleic acid (or the guide nucleic acid for the other selected CRISPR-Cas nuclease) to modify a target nucleic acid, wherein the cytosine deaminase domain or adenine deaminase domain of the fusion protein deaminates a cytosine base or adenosine base, respectively, in the target nucleic acid, thereby editing the target nucleic acid.

[0137] A “guide nucleic acid,” “guide RNA,” “gRNA,” “CRISPR RNA/DNA” “crRNA” or “crDNA” as used herein means a nucleic acid that comprises at least one spacer sequence, which is complementary to (and hybridizes to) a target DNA (e.g., protospacer), and at least one repeat sequence (e.g., a repeat of a Type V Cas12a CRISPR-Cas system, or a fragment or portion thereof; a repeat of a Type II Cas9 CRISPR-Cas system, or fragment thereof, a repeat of a Type V C2c1 CRISPR Cas system, or a fragment thereof; a repeat of a CRISPR-Cas system of, for example, C2c3, Cas12a (also referred to as Cpf1), Cas12b, Cas12c, Cas12d, Cas12e, Cas13a, Cas13b, Cas13c, Cas13d, Casl, CaslB, Cas2, Cas3, Cas3′, Cas3″, Cas4, Cas5, Cas6, Cas7, Cas8, Cas9 (also known as Csnl and Csxl2), Cas10, Csyl, Csy2, Csy3, Csel, Cse2, Cscl, Csc2, Csa5, Csn2, Csm2, Csm3, Csm4, Csm5, Csm6, Cmrl, Cmr3, Cmr4, Cmr5, Cmr6, Csbl, Csb2, Csb3, Csxl7, Csxl4, Csx10, Csx16, CsaX, Csx3, Csxl, Csxl5, Csfl, Csf2, Csf3, Csf4 (dinG), and/or Csf5, or a fragment thereof), wherein the repeat sequence may be linked to the 5′ end and/or the 3′ end of the spacer sequence. In some embodiments, the guide nucleic acid comprises DNA. In some embodiments, the guide nucleic acid comprises RNA (e.g., is a guide RNA). The design of a gRNA of this invention may be based on a Type I, Type II, Type III, Type IV, Type V, or Type VI CRISPR-Cas system.

[0138] In some embodiments, a Cas12a gRNA may comprise, from 5′ to 3′, a repeat sequence (full length or portion thereof (“handle”); e.g., pseudoknot-like structure) and a spacer sequence.

[0139] In some embodiments, a guide nucleic acid may comprise more than one repeat sequence-spacer sequence (e.g., 2, 3, 4, 5, 6, 7, 8, 9, 10, or more repeat-spacer sequences) (e.g., repeat-spacer-repeat, e.g., repeat-spacer-repeat-spacer-repeat-spacer-repeat-spacer-repeat-spacer, and the like). The guide nucleic acids of this invention are synthetic, human-made and not found in nature. A gRNA can be quite long and may be used as an aptamer (like in the MS2 recruitment strategy) or other RNA structures hanging off the spacer.

[0140] A “repeat sequence” as used herein, refers to, for example, any repeat sequence of a wild-type CRISPR Cas locus (e.g., a Cas9 locus, a Cas12a locus, a C2c1 locus, etc.) or a repeat sequence of a synthetic crRNA that is functional with the CRISPR-Cas effector protein encoded by the nucleic acid constructs of the invention. A repeat sequence useful with this invention can be any known or later identified repeat sequence of a CRISPR-Cas locus (e.g., Type I, Type II, Type III, Type IV, Type V or Type VI) or it can be a synthetic repeat designed to function in a Type I, II, III, IV, V or VI CRISPR-Cas system. A repeat sequence may comprise a hairpin structure and/or a stem loop structure. In some embodiments, a repeat sequence may form a pseudoknot-like structure at its 5′ end (i.e., “handle”). Thus, in some embodiments, a repeat sequence can be identical to or substantially identical to a repeat sequence from wild-type Type I CRISPR-Cas loci, Type II, CRISPR-Cas loci, Type III, CRISPR-Cas loci, Type IV CRISPR-Cas loci, Type V CRISPR-Cas loci and/or Type VI CRISPR-Cas loci. A repeat sequence from a wild-type CRISPR-Cas locus may be determined through established algorithms, such as using the CRISPRfinder offered through CRISPRdb (see, Grissa et al. Nucleic Acids Res. 35 (Web Server issue):W52-7). In some embodiments, a repeat sequence or portion thereof is linked at its 3′ end to the 5′ end of a spacer sequence, thereby forming a repeat-spacer sequence (e.g., guide nucleic acid, guide RNA/DNA, crRNA, crDNA).

[0141] In some embodiments, a repeat sequence comprises, consists essentially of, or consists of at least 10 nucleotides depending on the particular repeat and whether the guide nucleic acid comprising the repeat is processed or unprocessed (e.g., about 10, 11, 12, 13, 14, 15, 16, 17, 18, 19, 20, 21, 22, 23, 24, 25, 26, 27, 28, 29, 30, 31, 32, 33, 34, 35, 36, 37, 38, 39, 40, 41, 42, 43, 44, 45, 46, 47, 48, 49, 50 to 100 or more nucleotides, or any range or value therein; e.g., about). In some embodiments, a repeat sequence comprises, consists essentially of, or consists of about 10 to about 20, about 10 to about 30, about 10 to about 45, about 10 to about 50, about 15 to about 30, about 15 to about 40, about 15 to about 45, about 15 to about 50, about 20 to about 30, about 20 to about 40, about 20 to about 50, about 30 to about 40, about 40 to about 80, about 50 to about 100 or more nucleotides.

[0142] A repeat sequence linked to the 5′ end of a spacer sequence can comprise a portion of a repeat sequence (e.g., 5, 6, 7, 8, 9, 10, 11, 12, 13, 14, 15, 16, 17, 18, 19, 20, 21, 22, 23, 24, 25, 26, 27, 28, 29, 30, 31, 32, 33, 34, 35 or more contiguous nucleotides of a wild-type repeat sequence). In some embodiments, a portion of a repeat sequence linked to the 5′ end of a spacer sequence can be about five to about ten consecutive nucleotides in length (e.g., about 5, 6, 7, 8, 9, 10 nucleotides) and have at least 90% sequence identity (e.g., at least about 90%, 91%, 92%, 93%, 94%, 95%, 96%, 97%, 98%, 99%, or more) to the same region (e.g., 5′ end) of a wild-type CRISPR Cas repeat nucleotide sequence. In some embodiments, a portion of a repeat sequence may comprise a pseudoknot-like structure at its 5′ end (e.g., “handle”).

[0143] A “spacer sequence” as used herein is a nucleotide sequence that is complementary to a target nucleic acid (e.g., target DNA) (e.g., protospacer). The spacer sequence can be fully complementary or substantially complementary (e.g., at least about 70% complementary (e.g., about 70%, 71%, 72%, 73%, 74%, 75%, 76%, 77%, 78%, 79%, 80%, 81%, 82%, 83%, 84%, 85%, 86%, 87%, 88%, 89%, 90%, 91%, 92%, 93%, 94%, 95%, 96%, 97%, 98%, 99%, or more)) to a target nucleic acid. Thus, in some embodiments, the spacer sequence can have one, two, three, four, or five mismatches as compared to the target nucleic acid, which mismatches can be contiguous or noncontiguous. In some embodiments, the spacer sequence can have 70% complementarity to a target nucleic acid. In other embodiments, the spacer nucleotide sequence can have 80% complementarity to a target nucleic acid. In still other embodiments, the spacer nucleotide sequence can have 85%, 90%, 95%, 96%, 97%, 98%, 99% or 99.5% complementarity, and the like, to the target nucleic acid (protospacer). In some embodiments, the spacer sequence is 100% complementary to the target nucleic acid. A spacer sequence may have a length from about 15 nucleotides to about 30 nucleotides (e.g., 15, 16, 17, 18, 19, 20, 21, 22, 23, 24, 25, 26, 27, 28, 29, or 30 nucleotides, or any range or value therein). Thus, in some embodiments, a spacer sequence may have complete complementarity or substantial complementarity over a region of a target nucleic acid (e.g., protospacer) that is at least about 15 nucleotides to about 30 nucleotides in length. In some embodiments, the spacer is about 20 nucleotides in length. In some embodiments, the spacer is about 21, 22, or 23 nucleotides in length.

[0144] In some embodiments, the 5′ region of a spacer sequence of a guide nucleic acid may be fully complementary to a target nucleic acid, while the 3′ region of the spacer may be substantially complementary to the target nucleic acid (such as for a spacer in a Type V CRISPR-Cas system), or the 3′ region of a spacer sequence of a guide nucleic acid may be fully complementary to a target nucleic acid, while the 5′ region of the spacer may be substantially complementary to the target nucleic acid (such as for a spacer in a Type II CRISPR-Cas system), and therefore, the overall complementarity of the spacer sequence to the target nucleic acid may be less than 100%. Thus, for example, in a guide nucleic acid for a Type V CRISPR-Cas system, the first 1, 2, 3, 4, 5, 6, 7, 8, 9, 10 nucleotides in the 5′ region (i.e., seed region) of, for example, a 20 nucleotide spacer sequence may be 100% complementary to the target nucleic acid, while the remaining nucleotides in the 3′ region of the spacer sequence are substantially complementary (e.g., at least about 70% complementary) to the target nucleic acid. In some embodiments, the first 1 to 8 nucleotides (e.g., the first 1, 2, 3, 4, 5, 6, 7, 8, nucleotides, and any range therein) of the 5′ end of the spacer sequence may be 100% complementary to the target nucleic acid, while the remaining nucleotides in the 3′ region of the spacer sequence are substantially complementary (e.g., at least about 50% complementary (e.g., 50%, 55%, 60%, 65%, 70%, 71%, 72%, 73%, 74%, 75%, 76%, 77%, 78%, 79%, 80%, 81%, 82%, 83%, 84%, 85%, 86%, 87%, 88%, 89%, 90%, 91%, 92%, 93%, 94%, 95%, 96%, 97%, 98%, 99%, or more)) to the target nucleic acid.

[0145] As a further example, in a guide nucleic acid for a Type II CRISPR-Cas system, the first 1, 2, 3, 4, 5, 6, 7, 8, 9, 10 nucleotides in the 3′ region (i.e., seed region) of, for example, a 20 nucleotide spacer sequence may be 100% complementary to the target nucleic acid, while the remaining nucleotides in the 5′ region of the spacer sequence are substantially complementary (e.g., at least about 70% complementary) to the target nucleic acid. In some embodiments, the first 1 to 10 nucleotides (e.g., the first 1, 2, 3, 4, 5, 6, 7, 8, 9, 10 nucleotides, and any range therein) of the 3′ end of the spacer sequence may be 100% complementary to the target nucleic acid, while the remaining nucleotides in the 5′ region of the spacer sequence are substantially complementary (e.g., at least about 50% complementary (e.g., at least about 50%, 55%, 60%, 65%, 70%, 71%, 72%, 73%, 74%, 75%, 76%, 77%, 78%, 79%, 80%, 81%, 82%, 83%, 84%, 85%, 86%, 87%, 88%, 89%, 90%, 91%, 92%, 93%, 94%, 95%, 96%, 97%, 98%, 99%, or more or any range or value therein)) to the target nucleic acid. A recruiting guide RNA further comprises one or more recruiting motifs as described herein, which may be linked to the 5′ end of the guide or the 3′ end or it may be inserted into the recruiting guide nucleic acid (e.g., within the hairpin loop).

[0146] In some embodiments, a seed region of a spacer may be about 8 to about 10 nucleotides in length, about 5 to about 6 nucleotides in length, or about 6 nucleotides in length.

[0147] A “target nucleic acid”, “target DNA,” “target nucleotide sequence,” “target region,” and “target region in the genome” are used interchangeably herein and refer to a region of an organism's (e.g., a plant's) genome that comprises a sequence that is fully complementary (100% complementary) or substantially complementary (e.g., at least 70% complementary (e.g., 70%, 71%, 72%, 73%, 74%, 75%, 76%, 77%, 78%, 79%, 80%, 81%, 82%, 83%, 84%, 85%, 86%, 87%, 88%, 89%, 90%, 91%, 92%, 93%, 94%, 95%, 96%, 97%, 98%, 99%, or more)) to a spacer sequence in a guide nucleic acid as defined herein. A target nucleic acid is targeted by an editing system (or a component thereof) as described herein. A target region useful for a CRISPR-Cas system may be located immediately 3′ (e.g., Type V CRISPR-Cas system) or immediately 5′ (e.g., Type II CRISPR-Cas system) to a PAM sequence in the genome of the organism (e.g., a plant genome or mammalian (e.g., human) genome). A target region may be selected from any region of at least 15 consecutive nucleotides (e.g., 16, 17, 18, 19, 20, 21, 22, 23, 24, 25, 26, 27, 28, 29, 30 nucleotides, and the like) located immediately adjacent to a PAM sequence.

[0148] A “protospacer sequence” or “protospacer” as used herein refer to a sequence that is fully or substantially complementary to (and can hybridize to) a spacer sequence of a guide nucleic acid. In some embodiments, the protospacer is all or a portion of a target nucleic acid as defined herein that is fully or substantially complementary (and hybridizes) to the spacer sequence of the CRISPR repeat-spacer sequences (e.g., guide nucleic acids, CRISPR arrays, crRNAs).

[0149] In the case of Type V CRISPR-Cas (e.g., Cas12a) systems and Type II CRISPR-Cas (Cas9) systems, the protospacer sequence is flanked by (e.g., immediately adjacent to) a protospacer adjacent motif (PAM). For Type IV CRISPR-Cas systems, the PAM is located at the 5′ end on the non-target strand and at the 3′ end of the target strand (see below, as an example).

[0150] 5′-NNNNNNNNNNNNNNNNNNN-3′ RNA Spacer (SEQ ID NO:105)
[0151]
   | | | | | | | | | | | | | | | | | | | |

[0152] 3′AAANNNNNNNNNNNNNNNNNNN-5′ Target strand (SEQ ID NO:106)
[0153]
   | | | |

[0154] 5′TTTNNNNNNNNNNNNNNNNNNN-3′ Non-target strand (SEQ ID NO:107)

[0155] In the case of Type II CRISPR-Cas (e.g., Cas9) systems, the PAM is located immediately 3′ of the target region. The PAM for Type I CRISPR-Cas systems is located 5′ of the target strand. There is no known PAM for Type III CRISPR-Cas systems. Makarova et al. describes the nomenclature for all the classes, types and subtypes of CRISPR systems (Nature Reviews Microbiology 13:722-736 (2015)). Guide structures and PAMs are described by R. Barrangou (Genome Biol. 16:247 (2015)).

[0156] Canonical Cas12a PAMs are T rich. In some embodiments, a canonical Cas12a PAM sequence may be 5′-TTN, 5′-TTTN, or 5′-TTTV. In some embodiments, canonical Cas9 (e.g., S. pyogenes) PAMs may be 5′-NGG-3′. In some embodiments, non-canonical PAMs may be used but may be less efficient.

[0157] Additional PAM sequences may be determined by those skilled in the art through established experimental and computational approaches. Thus, for example, experimental approaches include targeting a sequence flanked by all possible nucleotide sequences and identifying sequence members that do not undergo targeting, such as through the transformation of target plasmid DNA (Esvelt et al. 2013. Nat. Methods 10:1116-1121; Jiang et al. 2013. Nat. Biotechnol. 31:233-239). In some aspects, a computational approach can include performing BLAST searches of natural spacers to identify the original target DNA sequences in bacteriophages or plasmids and aligning these sequences to determine conserved sequences adjacent to the target sequence (Briner and Barrangou. 2014. Appl. Environ. Microbiol. 80:994-1001; Mojica et al. 2009. Microbiology 155:733-740).

[0158] In some embodiments, the present invention provides expression cassettes and/or vectors comprising the nucleic acid constructs of the invention (e.g., one or more components of an editing system of the invention). In some embodiments, expression cassettes and/or vectors comprising the nucleic acid constructs of the invention and/or one or more guide nucleic acids may be provided. In some embodiments, a nucleic acid construct of the invention encodes an engineered protein, and/or a deaminase, and each may be comprised on the same or on a separate expression cassette or vector from that comprising the one or more guide nucleic acids. When the nucleic acid construct encoding an engineered protein or the components of an editing system is/are comprised on separate expression cassette(s) or vector(s) from that comprising the guide nucleic acid, a target nucleic acid may be contacted with (e.g., provided with) the expression cassette(s) or vector(s) encoding the engineered protein or components of an editing system in any order from one another and the guide nucleic acid, e.g., prior to, concurrently with, or after the expression cassette comprising the guide nucleic acid is provided (e.g., contacted with the target nucleic acid).

[0159] Methods of recruiting one or more components of an editing system to each other and/or to a target nucleic acid are known in the art and may include the use of a peptide tag or an affinity polypeptide that interacts with the peptide tag. In some embodiments, a guide nucleic acid may be linked to an RNA recruiting motif and a deaminase may be linked to an affinity polypeptide capable of interacting with the RNA recruiting motif, thereby recruiting the deaminase to the target nucleic acid. Alternatively, chemical interactions may be used to recruit a polypeptide (e.g., a deaminase) to a target nucleic acid.

[0160] A peptide tag (e.g., epitope) useful with this invention may include, but is not limited to, a GCN4 peptide tag (e.g., Sun-Tag), a c-Myc affinity tag, an HA affinity tag, a His affinity tag, an S affinity tag, a methionine-His affinity tag, an RGD-His affinity tag, a FLAG octapeptide, a strep tag or strep tag II, a V5 tag, and/or a VSV-G epitope. Any epitope that may be linked to a polypeptide and for which there is a corresponding affinity polypeptide that may be linked to another polypeptide may be used with this invention as a peptide tag. In some embodiments, a peptide tag may comprise 1 or 2 or more copies of a peptide tag (e.g., repeat unit, multimerized epitope (e.g., tandem repeats)) (e.g., 1, 2, 3, 4, 5, 6, 7, 8, 9, 10, 11, 12, 13, 14, 15, 16, 17, 18, 19, 20, 21, 22, 23, 24, 25 or more repeat units. In some embodiments, an affinity polypeptide that interacts with/binds to a peptide tag may be an antibody. In some embodiments, the antibody may be a scFv antibody. In some embodiments, an affinity polypeptide that binds to a peptide tag may be synthetic (e.g., evolved for affinity interaction) including, but not limited to, an affibody, an anticalin, a monobody and/or a DARPin (see, e.g., Sha et al., Protein Sci. 26(5):910-924 (2017)); Gilbreth (Curr Opin Struc Biol 22(4):413-420 (2013)), U.S. Pat. No. 9,982,053, each of which are incorporated by reference in their entireties for the teachings relevant to affibodies, anticalins, monobodies and/or DARPins.

[0161] In some embodiments, a guide nucleic acid may be linked to an RNA recruiting motif, and a polypeptide to be recruited (e.g., a deaminase) may be fused to an affinity polypeptide that binds to the RNA recruiting motif, wherein the guide binds to the target nucleic acid and the RNA recruiting motif binds to the affinity polypeptide, thereby recruiting the polypeptide to the guide and contacting the target nucleic acid with the polypeptide (e.g., deaminase). In some embodiments, two or more polypeptides may be recruited to a guide nucleic acid, thereby contacting the target nucleic acid with two or more polypeptides (e.g., deaminases).

[0162] In some embodiments of the invention, a guide RNA may be linked to one or to two or more RNA recruiting motifs (e.g., 1, 2, 3, 4, 5, 6, 7, 8, 9, 10 or more motifs; e.g., at least 10 to about 25 motifs), optionally wherein the two or more RNA recruiting motifs may be the same RNA recruiting motif or different RNA recruiting motifs. In some embodiments, an RNA recruiting motif and corresponding affinity polypeptide may include, but is not limited, to a telomerase Ku binding motif (e.g., Ku binding hairpin) and the corresponding affinity polypeptide Ku (e.g., Ku heterodimer), a telomerase Sm7 binding motif and the corresponding affinity polypeptide Sm7, an MS2 phage operator stem-loop and the corresponding affinity polypeptide MS2 Coat Protein (MCP), a PP7 phage operator stem-loop and the corresponding affinity polypeptide PP7 Coat Protein (PCP), an SfMu phage Com stem-loop and the corresponding affinity polypeptide Con RNA binding protein, a PUF binding site (PBS) and the affinity polypeptide Pumilio/fem-3 mRNA binding factor (PUF), and/or a synthetic RNA-aptamer and the aptamer ligand as the corresponding affinity polypeptide. In some embodiments, the RNA recruiting motif and corresponding affinity polypeptide may be an MS2 phage operator stem-loop and the affinity polypeptide MS2 Coat Protein (MCP). In some embodiments, the RNA recruiting motif and corresponding affinity polypeptide may be a PUF binding site (PBS) and the affinity polypeptide Pumilio/fem-3 mRNA binding factor (PUF). Exemplary RNA recruiting motifs and corresponding affinity polypeptides that may be useful with this invention can include, but are not limited to, SEQ ID NOs:108-118.

[0163] In some embodiments, the components for recruiting polypeptides and nucleic acids may include those that function through chemical interactions that may include, but are not limited to, rapamycin-inducible dimerization of FRB-FKBP; Biotin-streptavidin; SNAP tag; Halo tag; CLIP tag; DmrA-DmrC heterodimer induced by a compound; bifunctional ligand (e.g., fusion of two protein-binding chemicals together; e.g. dihyrofolate reductase (DHFR).

[0164] In some embodiments, the nucleic acid constructs, expression cassettes or vectors of the invention that are optimized for expression in a plant may be about 70% to 100% identical (e.g., about 70%, 71%, 72%, 73%, 74%, 75%, 76%, 77%, 78%, 79%, 80%, 81%, 82%, 83%, 84%, 85%, 86%, 87%, 88%, 89%, 90%, 91%, 92%, 93%, 94%, 95%, 96%, 97%, 98%, 99%, 99.5% or 100%) to the nucleic acid constructs, expression cassettes or vectors comprising the same polynucleotide(s) but which have not been codon optimized for expression in a plant.

[0165] As described herein, a “peptide tag” may be employed to recruit one or more polypeptides. A peptide tag may be any polypeptide that is capable of being bound by a corresponding affinity polypeptide. A peptide tag may also be referred to as an “epitope” and when provided in multiple copies, a “multimerized epitope.” Example peptide tags can include, but are not limited to, a GCN4 peptide tag (e.g., Sun-Tag), a c-Myc affinity tag, an HA affinity tag, a His affinity tag, an S affinity tag, a methionine-His affinity tag, an RGD-His affinity tag, a FLAG octapeptide, a strep tag or strep tag II, a V5 tag, and/or a VSV-G epitope. In some embodiments, a peptide tag may also include phosphorylated tyrosines in specific sequence contexts recognized by SH2 domains, characteristic consensus sequences containing phosphoserines recognized by 14-3-3 proteins, proline rich peptide motifs recognized by SH3 domains, PDZ protein interaction domains or the PDZ signal sequences, and an AGO hook motif from plants. Peptide tags are disclosed in WO2018/136783 and U.S. Patent Application Publication No. 2017/0219596, which are incorporated by reference for their disclosures of peptide tags. Peptide tags that may be useful with this invention can include, but are not limited to, SEQ ID NO:119 and SEQ ID NO:120. An affinity polypeptide useful with peptide tags includes, but is not limited to, SEQ ID NO:121.

[0166] A peptide tag may comprise or be present in one copy or in 2 or more copies of the peptide tag (e.g., multimerized peptide tag or multimerized epitope) (e.g., about 2, 3, 4, 5, 6, 7, 8, 9, 10, 11, 12, 13, 14, 15, 16, 17, 18, 9, 20, 21, 22, 23, 24, or 25 or more peptide tags). When multimerized, the peptide tags may be fused directly to one another or they may be linked to one another via one or more amino acids (e.g., 1, 2, 3, 4, 5, 6, 7, 8, 9, 10, 11, 12, 13, 14, 15, 16, 17, 18, 19, 20 or more amino acids, optionally about 3 to about 10, about 4 to about 10, about 5 to about 10, about 5 to about 15, or about 5 to about 20 amino acids, and the like, and any value or range therein. Thus, in some embodiments, a CRISPR-Cas effector protein of the invention may comprise a CRISPR-Cas effector protein domain fused to one peptide tag or to two or more peptide tags, optionally wherein the two or more peptide tags are fused to one another via one or more amino acid residues. In some embodiments, a peptide tag useful with the invention may be a single copy of a GCN4 peptide tag or epitope or may be a multimerized GCN4 epitope comprising about 2 to about 25 or more copies of the peptide tag (e.g., about 2, 3, 4, 5, 6, 7, 8, 9, 10, 11, 12, 13, 14, 15, 16, 17, 18, 19, 20, 21, 22, 23, 24, 25 or more copies of a GCN4 epitope or any range therein).

[0167] In some embodiments, a peptide tag may be fused to a CRISPR-Cas polypeptide or domain. In some embodiments, a peptide tag may be fused or linked to the C-terminus of a CRISPR-Cas effector protein to form a CRISPR-Cas fusion protein. In some embodiments, a peptide tag may be fused or linked to the N-terminus of a CRISPR-Cas effector protein to form a CRISPR-Cas fusion protein. In some embodiments, a peptide tag may be fused within a CRISPR-Cas effector protein (e.g., a peptide tag may be in a loop region of a CRISPR-Cas effector protein). In some embodiments, peptide tag may be fused to a cytosine deaminase and/or to an adenine deaminase.

[0168] An “affinity polypeptide” (e.g., “recruiting polypeptide”) refers to any polypeptide that is capable of binding to its corresponding peptide tag, peptide tag, or RNA recruiting motif. An affinity polypeptide for a peptide tag may be, for example, an antibody and/or a single chain antibody that specifically binds the peptide tag, respectively. In some embodiments, an antibody for a peptide tag may be, but is not limited to, an scFv antibody. In some embodiments, an affinity polypeptide may be fused or linked to the N-terminus of a deaminase (e.g., a cytosine deaminase or an adenine deaminase). In some embodiments, the affinity polypeptide is stable under the reducing conditions of a cell or cellular extract.

[0169] The nucleic acid constructs of the invention and/or guide nucleic acids may be comprised in one or more expression cassettes as described herein. In some embodiments, a nucleic acid construct of the invention may be comprised in the same or in a separate expression cassette or vector from that comprising a guide nucleic acid and/or a recruiting guide nucleic acid.

[0170] When used in combination with guide nucleic acids and recruiting guide nucleic acids, the nucleic acid constructs of the invention (and expression cassettes and vectors comprising the same) may be used to modify a target nucleic acid and/or its expression. A target nucleic acid may be contacted with a nucleic acid construct of the invention and/or expression cassettes and/or vectors comprising the same prior to, concurrently with or after contacting the target nucleic acid with the guide nucleic acid/recruiting guide nucleic acid (and/or expression cassettes and vectors comprising the same.

[0171] According to embodiments of the present invention, provided are engineered proteins. An “engineered protein” as used herein refers to a polypeptide that comprises a polypeptide from a CRISPR-Cas effector protein (i.e., a CRISPR-Cas effector polypeptide) and a polypeptide that is heterologous to the CRISPR-Cas effector polypeptide (i.e., a heterologous polypeptide). The polypeptide from a CRISPR-Cas effector protein is referred to herein as a “CRISPR-Cas effector polypeptide” and a “CRISPR-Cas effector polypeptide” is a portion of a CRISPR-Cas effector protein. Accordingly, a “CRISPR-Cas effector polypeptide” as used herein does not include all of a CRISPR-Cas effector protein and, thus, has a reduced number of amino acids compared to the number of amino acids for the CRISPR-Cas effector protein. In some embodiments, a CRISPR-Cas effector polypeptide is devoid of a nuclease domain (e.g., devoid of a RuvC domain). The polypeptide that is heterologous to the CRISPR-Cas effector polypeptide is referred to herein as a heterologous polypeptide. The heterologous polypeptide may be a polypeptide of interest as described herein. In some embodiments, an engineered protein comprises all or a portion of a deaminase domain (e.g., a cytosine deaminase and/or adenine deaminase), which may be linked to any portion of the engineered protein. For example, in some embodiments, all or a portion of a deaminase domain is linked to the N- or C-terminus of the CRISPR-Cas effector polypeptide and/or to the N- or C-terminus of the engineered protein. In some embodiments, all or a portion of a deaminase domain is between two portions of an engineered protein. An engineered protein can cleave, cut, or nick a nucleic acid; bind a nucleic acid (e.g., a target nucleic acid and/or a guide nucleic acid); and/or identify, recognize, or bind a guide nucleic acid as defined herein. In some embodiments, an engineered protein or a portion thereof may be an enzyme (e.g., a nuclease, endonuclease, nickase, etc.) and/or may function as an enzyme. In some embodiments, an engineered protein of the present invention is an RNA-guided DNA-binding protein. In some embodiments, an engineered protein is present in and/or forms a complex with a guide nucleic acid that is a single guide nucleic acid (e.g., a gRNA, CRISPR array, and/or crRNA), optionally wherein the guide nucleic acid is a single crRNA. In some embodiments, a complex comprises an engineered protein and a guide nucleic acid and the guide nucleic acid and/or complex consists of a single guide nucleic acid (e.g., a single crRNA). In some embodiments, an engineered protein binds a single guide nucleic acid (e.g., a single crRNA), recognizes and/or binds a target nucleic acid, and has nuclease activity, optionally wherein the engineered protein cleaves the target strand of the target nucleic acid.

[0172] In some embodiments, an engineered protein comprises a first CRISPR-Cas effector polypeptide and a heterologous polypeptide. The first CRISPR-Cas effector polypeptide may be devoid of a nuclease domain, optionally devoid of a RuvC domain. The heterologous polypeptide may be linked to the N- or C-terminus of the first CRISPR-Cas effector polypeptide, optionally with or without a linker (e.g., a peptide linker). In some embodiments, the first CRISPR-Cas effector polypeptide is a portion of a first CRISPR-Cas effector protein (e.g., a portion of a Type V CRISPR-Cas effector protein such as a portion of a Cas12a). In some embodiments, the heterologous polypeptide comprises a nuclease domain, optionally a HNH domain (e.g., an HNH domain comprising a sequence having at least 70%, 75%, 80%, 85%, 90%, 95%, 96%, 97%, 98%, 99%, or 100% sequence identity to the amino acid sequence of one or more of SEQ ID NOs:1 or 169-174). In some embodiments, the heterologous polypeptide comprises a HNH domain that is from a CRISPR-Cas effector protein and/or comprises a sequence having at least 70%, 75%, 80%, 85%, 90%, 95%, 96%, 97%, 98%, 99%, or 100% sequence identity to the amino acid sequence of one of SEQ ID NOs:1 or 172. In some embodiments, the heterologous polypeptide comprises a HNH domain that is not from a CRISPR-Cas effector protein and/or comprises a sequence having at least 70%, 75%, 80%, 85%, 90%, 95%, 96%, 97%, 98%, 99%, or 100% sequence identity to the amino acid sequence of one of SEQ ID NOs:169-171 or 173-174. In some embodiments, the heterologous polypeptide is a polypeptide from a CRISPR-Cas effector protein, optionally wherein the heterologous polypeptide is from a different type of CRISPR-Cas effector protein (e.g., a Type II CRISPR-Cas effector protein) than the type of the first CRISPR-Cas effector protein (e.g., a Type IV CRISPR-Cas effector protein) from which the first CRISPR-Cas effector polypeptide is a portion of.

[0173] In some embodiments, an engineered protein comprises a first CRISPR-Cas effector polypeptide, a heterologous polypeptide, and a second CRISPR-Cas effector polypeptide, which may be linked together in any order. In some embodiments, the first CRISPR-Cas effector polypeptide may be devoid of a RuvC domain. The heterologous polypeptide may be linked to the N- or C-terminus of the first CRISPR-Cas effector polypeptide, optionally with or without a linker (e.g., a peptide linker), and/or the heterologous polypeptide may be linked to the N- or C-terminus of the second CRISPR-Cas effector polypeptide, optionally with or without a linker (e.g., a peptide linker). In some embodiments, the heterologous polypeptide is between the first CRISPR-Cas effector polypeptide and the second CRISPR-Cas effector polypeptide. In some embodiments, the first CRISPR-Cas effector polypeptide is a portion of a first CRISPR-Cas effector protein (e.g., a portion of a Type V CRISPR-Cas effector protein such as a portion of a Cas12a) and the second CRISPR-Cas effector polypeptide is a portion of a second CRISPR-Cas effector protein (e.g., a portion of a Type V CRISPR-Cas effector protein such as a portion of a Cas12a), wherein the first CRISPR-Cas effector protein and second CRISPR-Cas effector protein may be the same protein or different proteins. In some embodiments, the first CRISPR-Cas effector protein and the second CRISPR-Cas effector protein are the same, thereby the first CRISPR-Cas effector polypeptide and second CRISPR-Cas effector polypeptide are portions from the same protein, but may be different portions of the CRISPR-Cas effector protein. The first CRISPR-Cas effector polypeptide and second CRISPR-Cas effector polypeptide may have different sequences. In some embodiments, first CRISPR-Cas effector polypeptide and second CRISPR-Cas effector polypeptide may comprise a sequence that is the same. In some embodiments, the first CRISPR-Cas effector polypeptide and second CRISPR-Cas effector polypeptide together provide the full sequence of the CRISPR-Cas effector protein. In some embodiments, the first CRISPR-Cas effector polypeptide and second CRISPR-Cas effector polypeptide together do not make up the full sequence of the CRISPR-Cas effector protein (i.e., a portion of the sequence of the CRISPR-Cas effector protein is not present in the two sequences of the first CRISPR-Cas effector polypeptide and second CRISPR-Cas effector polypeptide); for example, 1 or 5 to 10, 15, 20, 25, 30, or more amino acids (e.g., 1, 2, 3, 4, 5, 6, 7, 8, 9, 10, 15, 20, 25, 30, or more amino acid(s)) of the CRISPR-Cas effector protein may not be present in the sequences of the first and second CRISPR-Cas effector polypeptides. In some embodiments, the heterologous polypeptide comprises a nuclease domain, optionally a HNH domain (e.g., an HNH domain from a Type II CRISPR-Cas effector protein). In some embodiments, the heterologous polypeptide comprises a HNH domain that is not from a CRISPR-Cas effector protein. In some embodiments, the heterologous polypeptide is a polypeptide from a CRISPR-Cas effector protein, optionally wherein the heterologous polypeptide is from a different type of CRISPR-Cas effector protein (e.g., a Type II CRISPR-Cas effector protein) than the type of the first CRISPR-Cas effector protein (e.g., a Type IV CRISPR-Cas effector protein) from which the first CRISPR-Cas effector polypeptide is a portion of and/or than the type of the second CRISPR-Cas effector protein (e.g., a Type IV CRISPR-Cas effector protein) from which the second CRISPR-Cas effector polypeptide is a portion of. In some embodiments, the heterologous polypeptide is from a Type II CRISPR-Cas effector protein (e.g., is a portion (e.g., the HNH domain or a portion thereof) of the Type II CRISPR-Cas effector protein), the first CRISPR-Cas effector polypeptide is a portion of a Type IV CRISPR-Cas effector protein, and the second CRISPR-Cas effector polypeptide is a portion of a Type IV CRISPR-Cas effector protein, wherein the first and second CRISPR-Cas effector polypeptides are different. In some embodiments, the heterologous polypeptide is heterologous to one of the first CRISPR-Cas effector polypeptide and second CRISPR-Cas effector polypeptide. In some embodiments, the heterologous polypeptide is heterologous to both the first CRISPR-Cas effector polypeptide and the second CRISPR-Cas effector polypeptide.

[0174] “Heterologous polypeptide” as used herein refers to a non-naturally occurring polypeptide compared to a CRISPR-Cas effector polypeptide of an engineered protein. Accordingly, a heterologous polypeptide of an engineered protein is not found in nature in at least one CRISPR-Cas effector polypeptide of the engineered protein, so the heterologous polypeptide is non-naturally occurring with respect the at least one CRISPR-Cas effector polypeptide. For example, an engineered protein of the present invention includes a CRISPR-Cas effector polypeptide that is a portion of a CRISPR-Cas effector protein and the engineered protein includes a heterologous polypeptide, and the heterologous polypeptide is non-naturally occurring compared to the CRISPR-Cas effector polypeptide in the absence of the heterologous polypeptide (e.g., the CRISPR-Cas effector polypeptide without or prior to including (e.g., insertion or fusion of) the heterologous polypeptide and the CRISPR-Cas effector polypeptide); in some embodiments, the heterologous polypeptide is heterologous to the CRISPR-Cas effector protein from which the CRISPR-Cas effector polypeptide is a portion of. In some embodiments, an engineered protein includes a heterologous polypeptide, a first CRISPR-Cas effector polypeptide that is a portion of a first CRISPR-Cas effector protein, and a second CRISPR-Cas effector polypeptide that is a portion of a second CRISPR-Cas effector protein, and the heterologous polypeptide is non-naturally occurring in (i.e., heterologous to) the first CRISPR-Cas effector polypeptide, the first CRISPR-Cas effector protein, the second CRISPR-Cas effector, and the second CRISPR-Cas effector protein. Similarly, a nucleotide sequence encoding a heterologous polypeptide is heterologous to (i.e., non-naturally occurring compared to) a nucleotide sequence encoding a CRISPR-Cas effector polypeptide of an engineered protein.

[0175] In some embodiments, the heterologous polypeptide comprises a polypeptide or domain from a different type of protein than a CRISPR-Cas effector polypeptide of the engineered protein. In some embodiments, an engineered protein comprises one or more (e.g., 1, 2, 3, or more) portion(s) of (i.e., one or more CRISPR-Cas effector polypeptide(s) from) a Type V CRISPR-Cas effector protein (e.g., Cas 12a) and one or more (e.g., 1, 2, 3, or more) polypeptide(s) from a different type of CRISPR-Cas effector protein such as a Type II CRISPR-Cas effector protein. When two or more portions or polypeptides are from the same protein and each are present in an engineered protein, the two or more portions or polypeptides may be separated from each other in the engineered protein by a linker and/or a heterologous polypeptide (i.e., the two or more portions or polypeptides may not be directly linked) or may be in a different order than that of the protein from which they are from (e.g., a wild-type protein and/or CRISPR-Cas effector protein). In some embodiments, an engineered protein comprises one or more (e.g., 1, 2, 3, or more) portion(s) of (i.e., one or more CRISPR-Cas effector polypeptide(s) from) a Type V CRISPR-Cas effector protein (e.g., Cas 12a) and at least one polypeptide from and/or portion of a Type II CRISPR-Cas effector protein (e.g., Cas 9). In some embodiments, an engineered protein comprises a first CRISPR-Cas effector polypeptide that is a portion of a Type V CRISPR-Cas effector protein (e.g., Cas 12a) and a heterologous polypeptide from a Type II CRISPR-Cas effector protein (e.g., Cas 9). In some embodiments, an engineered protein comprises a first CRISPR-Cas effector polypeptide that is a portion of a Type V CRISPR-Cas effector protein (e.g., Cas 12a), a heterologous polypeptide from a Type II CRISPR-Cas effector protein (e.g., Cas 9), and a second CRISPR-Cas effector polypeptide that is a portion of a Type V CRISPR-Cas effector protein (e.g., Cas 12a), optionally wherein the first and second CRISPR-Cas effector polypeptides are different portions from the same Type V CRISPR-Cas effector protein (e.g., Cas 12a). In some embodiments, an engineered protein comprises a first CRISPR-Cas effector polypeptide that is a portion of a Type V CRISPR-Cas effector protein (e.g., Cas 12a), a heterologous polypeptide that comprises a HNH domain or a portion thereof, and a second CRISPR-Cas effector polypeptide that is a portion of a Type V CRISPR-Cas effector protein (e.g., Cas 12a), optionally wherein the first and second CRISPR-Cas effector polypeptides are different portions from the same Type V CRISPR-Cas effector protein (e.g., Cas 12a).

[0176] In some embodiments, an engineered protein comprises one or more (e.g., 1, 2, 3, or more) domain(s) or a portion thereof from a Type V CRISPR-Cas effector protein (e.g., Cas 12a) and one or more (e.g., 1, 2, 3, or more) domain(s) or a portion thereof from a different type of CRISPR-Cas effector protein such as a Type II CRISPR-Cas effector protein. In some embodiments, an engineered protein comprises one or more (e.g., 1, 2, 3, or more) domain(s) or a portion thereof from a Type V CRISPR-Cas effector protein (e.g., Cas 12a) and at least one domain or a portion thereof from a Type II CRISPR-Cas effector protein (e.g., Cas 9). In some embodiments, the heterologous polypeptide of an engineered protein does not interfere or adversely affect the activity of a CRISPR-Cas effector polypeptide and/or of one or more domain(s) of the CRISPR-Cas effector polypeptide (e.g., a RuvC domain).

[0177] The heterologous polypeptide may have a length of about 10 to about 300 amino acids such as about 10, 20, 30, 40, 50, 60, 70, 80, 90, or 100 amino acids to about 110, 125, 150, 175, 200, 225, 250, 275, or 300 amino acids. In some embodiments, the heterologous polypeptide has a length of about 10, 20, 30, 40, 50, 60, 70, 80, 90, 100, 110, 120, 130, 140, 150, 160, 170, 180, 190, 200, 210, 220, 230, 240, 250, 260, 270, 280, 290, or 300 amino acids. In some embodiments, the heterologous polypeptide has a length of about 120, 125, 130, 135, or 140 amino acids to about 145, 150, 155, or 160 amino acids. In some embodiments, the heterologous polypeptide has a length of 120, 121, 122, 123, 124, 125, 126, 127, 128, 129, 130, 131, 132, 133, 134, 135, 136, 137, 138, 139, 140, 141, 142, 143, 144, 145, 146, 147, 148, 149, 150, 151, 152, 153, 154, 155, 156, 157, 158, or 160 amino acids. In some embodiments, the heterologous polypeptide is between a first CRISPR-Cas effector polypeptide and a second CRISPR-Cas effector polypeptide and the heterologous polypeptide is heterologous to one or both of the first and second CRISPR-Cas effector polypeptides.

[0178] In some embodiments, a CRISPR-Cas effector polypeptide has a length of about 100, 150, 200, or 250 amino acids to about 300, 350, or 400 amino acids. In some embodiments, a CRISPR-Cas effector polypeptide has a length of about 100, 110, 120, 130, 140, 150, 160, 170, 180, 190, 200, 210, 220, 230, 240, 250, 260, 270, 280, 290, 300, 310, 320, 330, 340, 350, 360, 370, 380, 390, or 400 amino acids. In some embodiments, a CRISPR-Cas effector polypeptide has a length of about 800, 850, or 900 amino acids to about 950, 1,000, 1,050, or 1,100 amino acids. In some embodiments, a CRISPR-Cas effector polypeptide has a length of about 800, 810, 820, 830, 840, 850, 860, 870, 880, 890, 900, 910, 920, 930, 940, 950, 960, 970, 980, 990, 1,000, 1,010, 1,020, 1,030, 1,040, 1,050, 1,060, 1,070, 1,080, 1,090, 1,100 amino acids. In some embodiments, an engineered protein comprises a first CRISPR-Cas effector polypeptide having a length of about 100, 150, 200, or 250 amino acids to about 300, 350, or 400 amino acids, a heterologous polypeptide having a length of about 10, 50, 100, or 140 amino acids to about 160, 200, 250, or 300 amino acids; and a second CRISPR-Cas effector polypeptide having a length of about 100, 200, 300, 400, 500, 600, 700, 800, 850, or 900 amino acids to about 950, 1,000, 1,050, or 1,100 amino acids.

[0179] In some embodiments, the heterologous polypeptide comprises a nuclease domain or a portion thereof, which can be referred to herein as a “heterologous nuclease domain or a portion thereof” since the nuclease domain or a portion thereof from the heterologous polypeptide is heterologous to one or more CRISPR-Cas effector polypeptide(s) present in the engineered protein. The heterologous polypeptide may be a DNA nuclease domain or a portion thereof. In some embodiments, the heterologous nuclease domain or a portion thereof is from a CRISPR-Cas effector protein. In some embodiments, the heterologous nuclease domain or a portion thereof is not from a CRISPR-Cas effector protein. In some embodiments, the heterologous nuclease domain or a portion thereof is from a bacterial protein, optionally wherein the heterologous nuclease domain or a portion thereof is from a restriction endonuclease, homing endonuclease, colicin, pyocin, reverse transcriptase, DNase, and/or a standalone HNH domain. In some embodiments, an engineered protein comprises a heterologous polypeptide that includes a nuclease domain or a portion thereof (i.e., a heterologous nuclease domain or a portion thereof), and the engineered protein is a nuclease that optionally cleaves the target strand of a target nucleic acid and/or the non-target stand of a target nucleic acid. In some embodiments, the engineered protein cleaves the target strand of a target nucleic acid and the non-target stand of the target nucleic acid and provides either a blunt-ended double strand break of the target nucleic acid or a staggered double-strand break of the target nucleic acid. In some embodiments, the engineered protein cleaves the target strand of a target nucleic acid and the non-target stand of the target nucleic acid and the distance (e.g., number of nucleotides) between the cut sites is 0, 1, 2, 3, 4, or 5 nucleotides to about 6, 7, 8, 9, 10, 11, 12, 13, 14, 15, 16, 17, 18, 19, or 20 nucleotides.

[0180] In some embodiments, the heterologous nuclease domain or a portion thereof may be a target strand nickase domain or a portion thereof. A “target strand nickase domain or a portion thereof” as used herein refers to a polypeptide that has nickase activity to the target strand of a target nucleic acid when the domain or portion thereof is in its native protein. That is, a target strand nickase domain or a portion thereof can or is capable of nicking (e.g., cleaving or breaking) the target strand (also referred to as the sense (e.g., “+”; template) strand) of the target nucleic acid when the domain or portion thereof is in its native protein. For example, the HNH domain of Cas9 nicks and/or has nickase activity to the target strand of a target nucleic acid. “Nickase activity” as used herein refers to a single-strand break in a nucleic acid.

[0181] In some embodiments, a target strand nickase domain or a portion thereof, when present in an engineered protein, may have nickase activity to the target strand of a target nucleic acid. In some embodiments, a target strand nickase domain or a portion thereof, when present in an engineered protein, may have nickase activity to the nontarget strand (also referred to as the antisense (e.g., “−”, complementary) strand) of a target nucleic acid. When a target strand nickase domain or a portion thereof in an engineered protein has nickase activity to both the target strand and nontarget strand, the target strand nickase domain or a portion thereof may cleave both strands sequentially. In some embodiments, a target strand nickase domain or a portion thereof in an engineered protein has more activity (e.g., enzymatic activity) towards the target strand than the nontarget strand of a target nucleic acid. For example, when present in an engineered protein, the target strand nickase domain or a portion thereof may prefer or cleave faster the target strand of a target nucleic acid than the nontarget strand of the target nucleic acid.

[0182] A “target strand specific nickase domain” as used herein refers to a polypeptide that has nickase activity only to the target strand of a target nucleic acid and does not nick the nontarget strand of the target nucleic acid. A “nontarget strand specific nickase domain” as used herein refers to a polypeptide that has nickase activity only to the nontarget strand of a target nucleic acid and does not nick the target strand of the target nucleic acid. A “target and nontarget strand nickase domain” as used herein refers to a polypeptide that has nickase activity to both the target strand and the nontarget strand of a target nucleic acid. In some embodiments, an engineered protein comprises a target strand nickase domain or a portion thereof and the target strand nickase domain or a portion thereof is a target strand specific nickase domain in the engineered protein. In some embodiments, an engineered protein comprises a target strand nickase domain or a portion thereof and the target strand nickase domain or a portion thereof is a nontarget strand specific nickase domain in the engineered protein. In some embodiments, an engineered protein comprises a target strand nickase domain or a portion thereof and the target strand nickase domain or a portion thereof is a target and nontarget strand nickase domain in the engineered protein.

[0183] An engineered protein may comprise a heterologous polypeptide that comprises target strand nickase domain or a portion thereof. Accordingly, the engineered protein may have nickase activity to the target strand of a target nucleic acid and/or to the nontarget strand of the target nucleic acid. Thereby, the engineered protein may be a target strand nickase and/or a nontarget strand nickase. A “target strand nickase” as used herein in reference to an engineered protein refers to an engineered protein that can or is capable of cleaving the target strand of a target nucleic acid. A “nontarget strand nickase” as used herein in reference to an engineered protein refers to an engineered protein that can or is capable of cleaving the nontarget strand of a target nucleic acid. A “target and nontarget strand nickase” as used herein in reference to an engineered protein refers to an engineered protein that can or is capable of cleaving both the target and nontarget strand of a target nucleic acid in any order (e.g., sequentially or simultaneously). In some embodiments, the engineered protein is a target strand nickase and/or has nickase activity to the target strand of a target nucleic acid. In some embodiments, the engineered protein is a nontarget strand nickase and/or has nickase activity to the nontarget strand of a target nucleic acid. In some embodiments, the engineered protein is a target and nontarget strand nickase and/or has nickase activity to the target strand and nontarget strand of a target nucleic acid.

[0184] In some embodiments, the heterologous polypeptide of an engineered protein comprises a target strand nickase domain or a portion thereof and the target strand nickase domain or a portion thereof of the engineered protein has nickase activity to the target strand of a target nucleic acid, thereby the engineered protein is a target strand nickase. In some embodiments, the heterologous polypeptide of an engineered protein comprises a target strand nickase domain or a portion thereof and the target strand nickase domain or a portion thereof of the engineered protein has nickase activity to the nontarget strand of a target nucleic acid, thereby the engineered protein is a nontarget strand nickase. In some embodiments, the heterologous polypeptide of an engineered protein comprises a target strand nickase domain or a portion thereof and the target strand nickase domain or a portion thereof of the engineered protein has nickase activity to the both the target and nontarget strand of a target nucleic acid, thereby the engineered protein is a target and nontarget strand nickase. In some embodiments, the heterologous polypeptide of an engineered protein comprises a target strand nickase domain or a portion thereof and the target strand nickase domain or a portion thereof of the engineered protein has nickase activity to at least the target strand of a target nucleic acid and a CRISPR-Cas effector polypeptide of the engineered protein comprises a nuclease domain or a portion thereof that has nickase activity to at least the nontarget strand of the target nucleic acid, thereby the engineered protein is a target and nontarget strand nickase. In some embodiments, the CRISPR-Cas effector polypeptide of the engineered protein comprises a nuclease domain or portion thereof that is a target and nontarget strand nickase domain or portion thereof, but the nuclease domain or portion thereof is inactivated so that nuclease activity to the target strand is inactivated, thereby the target strand of the target nucleic acid is not nicked by the nuclease domain or portion thereof.

[0185] In some embodiments, an engineered protein may comprise one or more (e.g., 1, 2, or more) nuclease domain(s) or a portion thereof. In some embodiments, an engineered protein comprises at least two different nuclease domains or a portion thereof. In some embodiments, an engineered protein may comprise a native nuclease domain, optionally one or more (e.g., 1, 2, or more) native nuclease domain(s). A “native nuclease domain” as used herein refers to a nuclease domain that is naturally present in a CRISPR-Cas effector protein. In some embodiments, an engineered protein comprises a first heterologous nuclease domain (e.g., from and/or present in the heterologous polypeptide) and a second nuclease domain. The second nuclease domain may be from and/or present in CRISPR-Cas effector protein. In some embodiments, the first nuclease domain may be a native nuclease domain and/or the second nuclease domain may be a native nuclease domain. In some embodiments, the second nuclease domain is a target and nontarget strand nickase domain or a portion thereof. A “nontarget and target strand nickase domain or a portion thereof” as used herein refers to a polypeptide that has nickase activity to the nontarget strand of a target nucleic acid and to the target strand of the target nucleic acid when the domain or portion thereof is in its native protein, and cleaves the nontarget strand before the target strand or prefers or cleaves faster the nontarget strand than the target strand. A nontarget and target strand nickase domain or a portion thereof may provide a staggered double strand break in the target nucleic acid. In some embodiments, the second nuclease domain is active. In some embodiments, the second nuclease domain is deactivated (i.e., dead, inactive, or devoid of nickase activity). In some embodiments, the second nuclease domain only nicks the nontarget strand of a target nucleic acid and/or comprises a mutation that inactivates nickase activity to the target strand of a target nucleic acid. A nuclease domain or portion thereof in an engineered protein may be deactivated by a mutation in the nuclease domain or portion thereof that removes or inactivates nickase activity. In some embodiments, an engineered protein comprises a nuclease domain or portion thereof from a Type V CRISPR-Cas effector protein such as a Cas12a (e.g., from one of SEQ ID NO:50-66) or Cas12b (e.g., from SEQ ID NO:151). In some embodiments, the nuclease domain is a RuvC domain from a Type V CRISPR-Cas effector protein such as a Cas12a or Cas12b. An engineered protein may comprise one or more nuclease domain(s) that provide a blunt-ended double strand break of a target nucleic acid or a staggered double-strand break of a target nucleic acid.

[0186] In some embodiments, the heterologous polypeptide of an engineered protein comprises all or a portion of a HNH domain of a CRISPR-Cas effector protein. The heterologous polypeptide and/or HNH domain may comprise and/or form a zinc finger motif. In some embodiments, the heterologous polypeptide and/or HNH domain has a length of about 10, 20, 30, 40, 50, 60, 70, 80, 90, or 100 amino acids to about 110, 125, 150, 175, 200, 225, 250, 275, or 300 amino acids. The heterologous polypeptide and/or HNH domain may comprise about 25 or 30 to about 40 or 45 amino acids and/or may comprise one or at least two histidines and an asparagine that are optionally in a nucleic acid binding and cleavage site. In some embodiments, the heterologous polypeptide and/or HNH domain may comprise about 25 or 30 to about 40 or 45 amino acids that include two histidines and one asparagine that are present in and/or form a zinc finger motif. The heterologous polypeptide and/or HNH domain may comprise and/or form two antiparallel beta-strands that are linked by a loop and/or may comprise an alpha helix, optionally wherein a histidine is present in at least one of the beta-strands, an asparagine is present in the loop, and/or a histidine or asparagine is present in the alpha-helix. The heterologous polypeptide may comprise all or a portion of a HNH domain having a structure as described in Pediaditakis M, et al. Journal of Bacteriology 194(22); 6184-6194. In some embodiments, the heterologous polypeptide of an engineered protein comprises all or a portion of a HNH domain of a Type II CRISPR-Cas effector protein such as a Cas9 HNH domain. The heterologous polypeptide of an engineered protein may comprise all or a portion of a HNH domain (e.g., a Cas9 HNH domain) that is inactive. The HNH domain or a portion thereof may have an inactivating mutation (e.g., a mutation that removes nickase activity). In some embodiments, the heterologous polypeptide of an engineered protein comprises all or a portion of an HNH domain that has an inactivating mutation and/or the HNH domain is inactive (e.g., does not have nickase activity). In some embodiments, the heterologous polypeptide of an engineered protein comprises all or a portion of an inactivated HNH domain that has a H840A mutation. In some embodiments, the heterologous polypeptide of an engineered protein comprises an amino acid sequence having at least 70%, 75%, 80%, 85%, 90%, 95%, 96%, 97%, 98%, 99%, or 100% sequence identity to the amino acid sequence of one or more of SEQ ID NOs:1 or 169-174. In some embodiments, the heterologous polypeptide of an engineered protein comprises the amino acid sequence of any one of SEQ ID NOs:1 or 169-174.

[0187] In some embodiments, the heterologous polypeptide of an engineered protein comprises an amino acid sequence that has an amino acid residue that is not a histidine residue at a position corresponding to amino number 839 of SEQ ID NO:81, when the amino acid sequence of the heterologous polypeptide and SEQ ID NO:81 are optimally aligned. In some embodiments, the heterologous polypeptide of an engineered protein comprises an amino acid sequence that has an amino acid residue that is not a histidine residue at a position corresponding to amino number 75 of SEQ ID NO:1, when the amino acid sequence of the heterologous polypeptide and SEQ ID NO:1 are optimally aligned. In some embodiments, the heterologous polypeptide of an engineered protein comprises an amino acid sequence that has an alanine residue at a position corresponding to amino number 839 of SEQ ID NO:81, when the amino acid sequence of the heterologous polypeptide and SEQ ID NO:81 are optimally aligned. In some embodiments, the heterologous polypeptide of an engineered protein comprises an amino acid sequence that has an alanine residue at a position corresponding to amino number 75 of SEQ ID NO:1, when the amino acid sequence of the heterologous polypeptide and SEQ ID NO:1 are optimally aligned.

[0188] In some embodiments, the heterologous polypeptide of an engineered protein may be between and/or linked to (e.g., directly or indirectly) two consecutive or nonconsecutive amino acids that are present in a CRISPR-Cas effector protein. In some embodiments, the engineered protein is prepared by inserting a heterologous polypeptide between two consecutive or nonconsecutive amino acids of a CRISPR-Cas effector protein or a portion thereof. In some embodiments, an engineered protein may comprise in the amino terminal to carboxy terminal direction, a first CRISPR-Cas effector polypeptide, a heterologous polypeptide, and a second CRISPR-Cas effector polypeptide, with the first and second CRISPR-Cas effector polypeptides being from the same CRISPR-Cas effector protein.

[0189] In some embodiments, a CRISPR-Cas effector polypeptide comprises a portion of a Type V CRISPR-Cas effector protein such as Cas12a or Cas12b. The CRISPR-Cas effector polypeptide may comprise all or a portion of a nucleic acid binding domain such as a nucleic acid binding domain from a Type V CRISPR-Cas effector protein (e.g., Cas12a or Cas12b). In some embodiments, a CRISPR-Cas effector polypeptide of an engineered protein comprises an amino acid sequence having at least 70%, 75%, 80%, 85%, 90%, 95%, 96%, 97%, 98%, 99%, or 100% sequence identity to a portion of the amino acid sequence of one or more of SEQ ID NOs:50-66 or 151. In some embodiments, a CRISPR-Cas effector polypeptide comprises a portion of the amino acid sequence of any one of SEQ ID NOs:50-66 or 151. In some embodiments, an engineered protein comprises two or more (e.g., 2, 3, 4, or more) separate portions of the amino acid sequence of any one of SEQ ID NOs:50-66 or 151.

[0190] In some embodiments, an engineered protein of the present invention may be devoid of about 5, 10, 15, 20, 25, 30, 35, 40, 45, 50, 55, 60, 65, 70, 75, 80, 85, 90, 95, 100 or more amino acids that are present in a CRISPR-Cas effector protein such as one having a sequence of any one of SEQ ID NOs:50-66 or 151. In some embodiments, an engineered protein of the present invention may be devoid of 0, 1, 2, 3, 4, 5, 6, 7, 8, 9, 10, 11, 12, 13, 14, or 15 amino acids that are present in a CRISPR-Cas effector protein such as one having a sequence of any one of SEQ ID NOs:50-66 or 151. For example, an engineered protein may be devoid of one or more amino acids from amino acid residue 283 to amino acid residue 293 of SEQ ID NO:50 or SEQ ID NO:58; from amino acid residue 331 to amino acid residue 341 of SEQ ID NO:55; from amino acid residue 312 to amino acid residue 322 of SEQ ID NO:51; or from corresponding amino acid residues for a sequence that is optimally aligned to one of SEQ ID NOs:50, 51, 58, or 55 (e.g., from amino acid residues that correspond to amino acid residues 283-293 when a sequence (e.g., SEQ ID NO:52) is optimally aligned to SEQ ID NO:50). In some embodiments, an engineered protein is devoid of one or more (e.g., 1, 2, 3, 4, or more) interdomain linker region(s) (e.g., a region that is between two domains such as two adjacent domains) that are present in a CRISPR-Cas effector protein (e.g., one having a sequence of any one of SEQ ID NOs:50-66 or 151) from which a CRISPR-Cas effector is a portion of and that is present in the engineered protein.

[0191] In some embodiments, the heterologous polypeptide of an engineered protein may be between and/or linked to (e.g., directly or indirectly) two consecutive or nonconsecutive amino acids of a CRISPR-Cas effector protein (e.g., a CRISPR-Cas effector protein having an amino acid sequence of any one of SEQ ID NOs:50-66 or 151). For example, an engineered protein may comprise, from the N- to C-terminus, a first CRISPR-Cas effector polypeptide, an HNH domain, and a second CRISPR-Cas effector polypeptide, wherein the first and second CRISPR-Cas effector polypeptides are each a portion of a CRISPR-Cas effector protein and the last amino acid residue at the C-terminus of the first CRISPR-Cas effector polypeptide and the first amino acid reside at the N-terminus of the second CRISPR-Cas effector polypeptide are two consecutive or nonconsecutive amino acid residues of the a CRISPR-Cas effector protein. The heterologous polypeptide may be linked directly to one or both of the two consecutive or nonconsecutive amino acids of the CRISPR-Cas effector protein (i.e., no linker is used to attach one terminus of the heterologous polypeptide to a terminus of a CRISPR-Cas effector polypeptide that is a portion of the CRISPR-Cas effector protein). In some embodiments, the heterologous polypeptide may be linked indirectly (e.g., via a linker such as a peptide linker) to one or both of the two consecutive or nonconsecutive amino acids of the CRISPR-Cas effector protein. In some embodiments, the heterologous polypeptide of an engineered protein may be between and/or linked to (e.g., directly or indirectly) two consecutive amino acids of a CRISPR-Cas effector protein (e.g., a CRISPR-Cas effector protein having an amino acid sequence of any one of SEQ ID NOs:50-66 or 151). In some embodiments, the heterologous polypeptide of an engineered protein may be between and/or linked to (e.g., directly or indirectly) two nonconsecutive amino acids of a CRISPR-Cas effector protein (e.g., a CRISPR-Cas effector protein having an amino acid sequence of any one of SEQ ID NOs:50-66 or 151).

[0192] In some embodiments, the two consecutive or nonconsecutive amino acids are two of the amino acid residues from amino acid residue 250, 260, 270, or 280 to amino acid residue 290, 300, 310, 320, 330, 340, or 350 that are consecutive or nonconsecutive, respectively. In some embodiments, the heterologous polypeptide may be between and/or linked to (e.g., directly or indirectly) two consecutive or nonconsecutive amino acids that are two of the following amino acid residues: amino acid residues 250, 251, 252, 253, 254, 255, 256, 257, 258, 259, 260, 261, 262, 263, 264, 265, 266, 267, 268, 269, 270, 271, 272, 273, 274, 275, 276, 277, 278, 279, 280, 281, 282, 283, 284, 285, 286, 287, 288, 289, 290, 291, 292, 293, 294, 295, 296, 297, 298, 299, 300, 301, 302, 303, 304, 305, 306, 307, 308, 309, 310, 311, 312, 313, 314, 315, 316, 317, 318, 319, 320, 321, 322, 323, 324, 325, 326, 327, 328, 329, 330, 331, 332, 333, 334, 335, 336, 337, 338, 339, 340, 341, 342, 343, 344, 345, 346, 347, 348, 349, and 350 of a CRISPR-Cas effector protein (e.g., a CRISPR-Cas effector protein having an amino acid sequence of any one of SEQ ID NOs:50-66 or 151). In some embodiments, the heterologous polypeptide of an engineered protein may be between and/or linked to (e.g., directly or indirectly) two nonconsecutive amino acids of a CRISPR-Cas effector protein (e.g., a CRISPR-Cas effector protein having an amino acid sequence of any one of SEQ ID NOs:50-66 or 151), wherein one of the two nonconsecutive amino acid residues is amino acid residue 270, 271, 272, 273, 274, 275, 276, 277, 278, 279, 280, 281, 282, 283, 284, or 285 and the other of the two nonconsecutive amino acid residues is amino acid residue 286, 287, 288, 289, 290, 291, 292, 293, 294, 295, 296, 297, 298, 299, 300, 301, 302, 303, 304, or 305, optionally of SEQ ID NOs:50-66 or 151. In some embodiments, the heterologous polypeptide is between and/or linked to (e.g., directly or indirectly) amino acid residues 290 and 291, amino acid residues 291 and 292, amino acid residues 292 and 293, amino acid residues 293 and 294, amino acid residues 320 and 321, amino acid residues 321 and 322, amino acid residues 339 and 340, or amino acid residues 340 and 341 of a CRISPR-Cas effector protein such as a CRISPR-Cas effector protein having an amino acid sequence of any one of SEQ ID NOs:50-66 or 151. For example, in some embodiments, the heterologous polypeptide may be between and/or linked to (e.g., directly or indirectly) amino acid residues 290 and 291 of SEQ ID NO:50; amino acid residues 291 and 292 of SEQ ID NO:50; amino acid residues 291 and 292 of SEQ ID NO:58; amino acid residues 292 and 293 of SEQ ID NO:58; amino acid residues 320 and 321 of SEQ ID NO:51; amino acid residues 321 and 322 of SEQ ID NO:51; amino acid residues 322 and 323 of SEQ ID NO:51; amino acid residues 339 and 340 of SEQ ID NO:55; amino acid residues 340 and 341 of SEQ ID NO:55; or corresponding amino acid residues for a sequence that is optimally aligned to one of SEQ ID NOs:50, 51, 58, or 55 (e.g., amino acid residues that correspond to amino acid residues 291 and 292 when a sequence (e.g., SEQ ID NO:52) is optimally aligned to SEQ ID NO:50). In some embodiments, the heterologous polypeptide of an engineered protein may be in an interdomain linker region (e.g., a region that is between two domains such as two adjacent domains) of a CRISPR-Cas effector protein. In some embodiments, the heterologous polypeptide may be positioned in an engineered protein such that it is adjacent to an exposed portion of the target strand of a target nucleic acid.

[0193] In some embodiments, an engineered protein comprises all or a portion of a wedge domain, a Rec1 domain, a Rec2 domain, a PAM-interacting domain, a RuvC domain, a bridge helix, and/or a Nuc domain each of which may be from a Type V CRISPR-Cas effector protein such as Cas12a, Cas12b, and/or a protein having a sequence of any one of SEQ ID NOs:50-66 or 151. In some embodiments, an engineered protein comprises all or a portion of a Cas12a domain having a structure as described in Yamano, Takashi, et al., Mol Cell 67: 633-645 (2017). In some embodiments, the heterologous polypeptide of an engineered protein may be between a polypeptide for all or a portion of a Rec1 domain and a polypeptide for all or a portion of a Rec2 domain each of which may be from a Type V CRISPR-Cas effector protein such as Cas12a, Cas12b, and/or a protein having a sequence of any one of SEQ ID NOs:50-66 or 151. In some embodiments, all or a portion of the heterologous polypeptide is at an exposed surface or interface of the engineered protein. In some embodiments, the CRISPR-Cas effector polypeptide of an engineered protein comprises all or a portion of a RuvC domain. As one of skill in the art would understand, some domains (e.g., the wedge and RuvC domains of Cas12a) are not continuous in sequence and may be split into two or more (e.g., 2, 3, 4, or more) non-continuous sequences. For example, the polypeptide for Cas12 may have the following from the N- to C-terminus: first portion of the wedge domain (WED-1), Rec1 domain, Rec2 domain, second portion of the wedge domain (WED-2), PAM-interacting domain (PI), third portion of the wedge domain (WED-3), first portion of the RuvC domain (RuvC-1), bridge helix, second portion of the RuvC domain (RuvC-2), Nuc domain, and third portion of the RuvC domain (RuvC-3). In some embodiments, an engineered protein comprises all or a portion of an active RuvC domain. In some embodiments, an engineered protein comprises all or a portion of an inactivated RuvC domain, optionally all or a portion of an inactivated RuvC domain that has a D10A mutation. In some embodiments, an engineered protein comprises all or a portion of an inactivated RuvC domain and the polypeptide comprising all or a portion of the inactivated RuvC domain has an alanine at a position corresponding to amino acid residue 831 SEQ ID NO:50 when the polypeptide is optimally aligned to SEQ ID NO:50, optionally wherein the mutation is referred to as a D10A and/or D832A mutation.

[0194] A CRISPR-Cas effector polypeptide may comprise a nuclease, optionally a RuvC like nuclease. In some embodiments, a CRISPR-Cas effector polypeptide comprises a RuvC domain or a portion thereof. In some embodiments, a CRISPR-Cas effector polypeptide comprises a nuclease in the Rnase H superfamily. In some embodiments, a CRISPR-Cas effector polypeptide comprises RNase H-like enzyme having a catalytic core that may include a β-sheet comprising five β-strands, ordered 32 145, optionally where the β-strand 2 is antiparallel to the other β-strands. On both sides the central β-sheet may be flanked by α-helices, the number of which may differ between related enzymes. In some embodiments, a CRISPR-Cas effector polypeptide comprises a RNase H-like catalytic core where the active site residues include one or more of aspartic acid, glutamic acid and histidine. In some embodiments, a CRISPR-Cas effector polypeptide comprising a RNase H-like catalytic core may include negatively charged side chains in the active sites of the RNase H-like polypeptide that, directly or through a water molecule, are involved in coordinating a divalent metal ion. In some embodiments, a CRISPR-Cas effector polypeptide comprises RNase H-like catalytic core that uses a two ion-dependent mechanism of catalysis, optionally wherein the ion is Mg²⁺ and/or Mn²⁺. In some embodiments, a CRISPR-Cas effector polypeptide comprises nuclease and/or RNase H-like nuclease as described in Majorek K A, et al. Nucleic Acids Res. 2014; 42(7):4160-4179, which is incorporated herein by reference in its entirety.

[0195] In some embodiments, a CRISPR-Cas effector polypeptide comprises one or more (e.g., 1, 2, 3, 4 or more) mutations. The one or more mutations may be to improve or modify the activity of a heterologous polypeptide and/or the activity of a CRISPR-Cas effector polypeptide. In some embodiments, a CRISPR-Cas effector polypeptide may comprise an inactivating mutation such as a D10A mutation in the RuvC domain. In some embodiments, a CRISPR-Cas effector polypeptide comprises all or a portion of a Rec1 domain that comprises one or more (e.g., 1, 2, 3, 4 or more) mutations such as in one or more of amino acid residue(s) 243-253 of a CRISPR-Cas effector protein (e.g., a CRISPR-Cas effector protein having an amino acid sequence of any one of SEQ ID NOs:50-66 or 151) and/or in the sequence GFVTESGEKIK (SEQ ID NO:122). In some embodiments, a CRISPR-Cas effector polypeptide comprises a hairpin and/or the sequence GFVTESGEKIK (SEQ ID NO:122), and one or more of the amino acid residue(s) in the hairpin and/or sequence may be mutated. In some embodiments, a CRISPR-Cas effector polypeptide comprises a hairpin and/or the sequence GFVTESGEKIK (SEQ ID NO:122), and all or a portion of the hairpin and/or sequence is deleted. In some embodiments, a CRISPR-Cas effector polypeptide comprises a hairpin and/or the sequence GFVTESGEKIK (SEQ ID NO:122), and 1, 2, 3, 4, 5, or more amino acid residues are added to one or both ends of the hairpin and/or sequence.

[0196] In some embodiments, an engineered protein comprises, from the N- to C-terminus, a first CRISPR-Cas effector polypeptide, an HNH domain, and a second CRISPR-Cas effector polypeptide, wherein the first and second CRISPR-Cas effector polypeptides are each a portion of deactivated LbCas12a (e.g., LbCas12a having a sequence of SEQ ID NO:50) and the last amino acid residue at the C-terminus of the first CRISPR-Cas effector polypeptide and the first amino acid reside at the N-terminus of the second CRISPR-Cas effector polypeptide are two consecutive amino acid residues of the deactivated LbCas12a. The HNH domain may be from Streptococcus pyogenes Cas9 (SpCas9) and/or may have a sequence comprising SEQ ID NO:1. In some embodiments, the HNH domain may have a sequence of any one of SEQ ID NOs:1 or 169-174. The HNH domain may be positioned in the engineered protein such that it is adjacent to an exposed portion of the target strand of a target nucleic acid. The engineered protein may be a target strand nickase. In some embodiments, the engineered protein only nicks the target DNA strand. In some embodiments, the engineered protein is a target and nontarget strand nickase.

[0197] One or more (e.g., 1, 2, 3, 4, or more) linker(s) may be present in an engineered protein. For example, a linker may be present between a CRISPR-Cas effector polypeptide and a heterologous polypeptide. In some embodiments, a linker may be present between a first CRISPR-Cas effector polypeptide and a heterologous polypeptide and a linker may be present between the heterologous polypeptide and a second CRISPR-Cas effector polypeptide. Exemplary linkers include, but are not limited to, those described herein. In some embodiments, the linker comprises 1 to 2, 3, 4, 5, 6, 7, 8, 9, or 10 amino acids and/or comprises glycine and/or serine. In some embodiments, the linker comprises 1, 2, 3, or 4 amino acids that are glycine and/or serine. In some embodiments, the engineered protein is devoid of a linker between a CRISPR-Cas effector polypeptide and a heterologous polypeptide. In some embodiments, the heterologous polypeptide is indirectly linked to an amino acid residue at the N-terminus of a CRISPR-Cas effector polypeptide via a linker and/or the heterologous polypeptide is indirectly linked to an amino acid residue at the C-terminus of a CRISPR-Cas effector polypeptide via a linker.

[0198] In some embodiments, the heterologous polypeptide is directly linked (i.e., without a linker) to an amino acid residue at the N-terminus of a CRISPR-Cas effector polypeptide and/or the heterologous polypeptide is directly linked (i.e., without a linker) to an amino acid residue at the C-terminus of a CRISPR-Cas effector polypeptide.

[0199] An engineered protein may comprise an amino acid sequence having at least 70%, 75%, 80%, 85%, 90%, 95%, 96%, 97%, 98%, 99%, or more sequence identity to any one of SEQ ID NOs:2-17, 125-132, or 157-168. In some embodiments, an engineered protein comprises and/or has an amino acid sequence of any one of SEQ ID NOs:2-17, 125-132, or 157-168. An engineered protein may have at least 70%, 75%, 80%, 85%, 90%, 95%, 96%, 97%, 98%, 99%, or more sequence identity to all or a portion of an amino acid sequence of a wild-type CRISPR-Cas effector protein. In some embodiments, the engineered protein has at least 70%, 75%, 80%, 85%, 90%, 95%, 96%, 97%, 98%, 99%, or more sequence identity to all or a portion of the amino acid sequence of any one of SEQ ID NOs:50-66 or 151. In some embodiments, the engineered protein has about 70%, 75%, or 80% to about 85%, 90%, 95%, or 98% sequence identity to all or a portion of the amino acid sequence of any one of SEQ ID NOs:50-66 or 151.

[0200] An engineered protein may have increased efficiency compared to a CRISPR-Cas effector protein (e.g., Cas12a, a CRISPR-Cas effector protein having a sequence of SEQ ID NOs:50-66 or 151, and/or a wild-type CRISPR-Cas effector protein) such as increased efficiency in nicking the target strand and/or nontarget strand of a target nucleic acid. In some embodiments, an engineered protein may have increased efficiency compared to a CRISPR-Cas effector protein (e.g., Cas12a, a CRISPR-Cas effector protein having a sequence of SEQ ID NOs:50-66 or 151, and/or a wild-type CRISPR-Cas effector protein) in nicking the target strand of a target nucleic acid. In some embodiments, an engineered protein may provide for an increased number of target strand breaks in a target nucleic acid compared to the number of target strand breaks in the target nucleic acid with a CRISPR-Cas effector protein (e.g., Cas12a, a CRISPR-Cas effector protein having a sequence of SEQ ID NOs:50-66 or 151, and/or a wild-type CRISPR-Cas effector protein). In some embodiments, an engineered protein may have increased efficiency compared to a CRISPR-Cas effector protein (e.g., Cas12a, a CRISPR-Cas effector protein having a sequence of SEQ ID NOs:50-66 or 151, and/or a wild-type CRISPR-Cas effector protein) in modifying a target nucleic acid.

[0201] Compositions, complexes, and systems comprising an engineered protein may be provided according to embodiments of the present invention. In some embodiments, a composition, complex and/or system comprising an engineered protein may be a base editing composition, complex, and/or system. A composition, complex, and/or system of the present invention may include a guide nucleic acid (e.g., a guide RNA) and/or a deaminase (e.g., a cytosine deaminase and/or an adenine deaminase). In some embodiments, an engineered protein, guide nucleic acid, and optionally deaminase form a complex or are comprised in a complex (e.g., a ribonucleoprotein). The engineered protein, guide nucleic acid, and optionally deaminase may not naturally occur together and/or a complex comprising the engineered protein, guide nucleic acid, and optionally deaminase may not naturally occur together. In some embodiments, an engineered protein comprises and/or is fused to a deaminase (e.g., an adenine deaminase and/or a cytosine deaminase).

[0202] Also provided herein are nucleic acid molecules encoding an engineered protein of present invention along with an expression cassettes and/or vector comprising a nucleic acid molecule of the present invention.

[0203] According to some embodiments, a method is provided that comprises contacting a target nucleic acid with: an engineered protein of the present invention, a guide nucleic acid (e.g., a guide RNA), and optionally a deaminase. In some embodiments, the engineered protein, the guide nucleic acid, and/or deaminase form a complex or are comprised in a complex. In some embodiments, the method may modify the target nucleic acid and/or may provide one or more single strand breaks in the target nucleic acid.

[0204] In some embodiments, a composition, system, method, and/or complex comprising an engineered protein may have increased efficiency compared to a composition, system, method, and/or complex comprising a CRISPR-Cas effector protein (e.g., Cas12a, a CRISPR-Cas effector protein having a sequence of SEQ ID NOs:50-66 or 151, and/or a wild-type CRISPR-Cas effector protein). In some embodiments, a composition, system, method, and/or complex comprising an engineered protein that is a target strand nickase may have increased efficiency compared to a composition, system, method, and/or complex comprising a CRISPR-Cas effector protein (e.g., Cas12a, a CRISPR-Cas effector protein having a sequence of SEQ ID NOs:50-66 or 151, and/or a wild-type CRISPR-Cas effector protein). This may be because nicking the target strand may increase the efficiency of genome editing tools such as base editors and/or base diversifiers. In some embodiments, a composition, system, method, and/or complex comprising an engineered protein may provide for an increased number of target strand breaks in a target nucleic acid compared to the number of target strand breaks in the target nucleic acid with a composition, system, method, and/or complex comprising a CRISPR-Cas effector protein (e.g., Cas12a, a CRISPR-Cas effector protein having a sequence of SEQ ID NOs:50-66 or 151, and/or a wild-type CRISPR-Cas effector protein).

[0205] An engineered protein and/or a composition, system, method, and/or complex comprising an engineered protein may provide improved or altered indel size and/or composition, improved or altered deletion size in a target nucleic acid, improved or altered nicking ability on either strand (i.e., target or nontarget strand of a target nucleic acid), and/or increased nuclease activity compared to a CRISPR-Cas effector protein (e.g., Cas12a, a CRISPR-Cas effector protein having a sequence of SEQ ID NOs:50-66 or 151, and/or a wild-type CRISPR-Cas effector protein) and/or to a composition, system, method, and/or complex comprising a CRISPR-Cas effector protein (e.g., Cas12a, a CRISPR-Cas effector protein having a sequence of SEQ ID NOs:50-66 or 151, and/or a wild-type CRISPR-Cas effector protein). In some embodiments, an engineered protein and/or a composition, system, method, and/or complex comprising an engineered protein imparts nuclease function onto a catalytically inactivated CRISPR-Cas effector protein. In some embodiments, an engineered protein and/or a composition, system, method, and/or complex comprising an engineered protein provides a different editing profile and/or a different cleavage pattern for a target nucleic acid compared to the editing profile and/or a different cleavage pattern of the target nucleic acid for a Cas effector protein ((e.g., Cas12a, a CRISPR-Cas effector protein having a sequence of SEQ ID NOs:50-66 or 151, and/or a wild-type CRISPR-Cas effector protein) and/or a composition, system, method, and/or complex comprising a CRISPR-Cas effector protein (e.g., Cas12a, a CRISPR-Cas effector protein having a sequence of SEQ ID NOs:50-66 or 151, and/or a wild-type CRISPR-Cas effector protein).

[0206] In some embodiments, a method of the present invention may have increased efficiency in modifying a target nucleic acid compared to the efficiency of a control method (e.g., a method comprising contacting the target nucleic acid with a CRISPR-Cas effector protein (e.g., Cas12a, a CRISPR-Cas effector protein having a sequence of SEQ ID NOs:50-66 or 151, and/or a wild-type CRISPR-Cas effector protein) and/or that is devoid of an engineered protein).

[0207] As described herein, the engineered proteins, nucleic acids, expression cassettes, and/or vectors of the present invention may be codon optimized for expression in an organism. An organism useful with this invention may be any organism or cell thereof for which nucleic acid modification may be useful. An organism can include, but is not limited to, any animal (e.g., a mammal), any plant, any fungus, any archaeon, or any bacterium. In some embodiments, the organism may be a plant or cell thereof. In some embodiments, the organism is an animal such as a mammal (e.g., a human).

[0208] The target nucleic acid may be a genomic sequence from any organism (e.g., eukaryote such as a mammal or a plant). In some embodiments, the target nucleic acid is a genomic sequence from a model organism such as, but not limited to, Escherichia coli, an immortalized human cell line (e.g., HEK293, HeLa, etc.), Caenorhabditis elegans, and/or Drosophila Melanogaster. In some embodiments, the target nucleic acid is a genomic sequence from a non-model organism. Exemplary non-model organisms include, but are not limited to crop plants (e.g., fruit crop plants, vegetable crop plants, and/or field crop plants) and/or animals such as humans, primates and/or mice. In some embodiments, the non-model organism is a crop plant such as corn, soybean, wheat, or canola. In some embodiments, the non-model organism is an animal for testing and/or use of a human therapeutic.

[0209] A target nucleic acid of any plant or plant part may be modified using the nucleic acid constructs of the invention. Any plant (or groupings of plants, for example, into a genus or higher order classification) may be modified using an engineered protein of the invention including an angiosperm, a gymnosperm, a monocot, a dicot, a C3, C4, CAM plant, a bryophyte, a fern and/or fern ally, a microalgae, and/or a macroalgae. A plant and/or plant part useful with this invention may be a plant and/or plant part of any plant species/variety/cultivar. The term “plant part,” as used herein, includes but is not limited to, embryos, pollen, ovules, seeds, leaves, stems, shoots, flowers, branches, fruit, kernels, ears, cobs, husks, stalks, roots, root tips, anthers, plant cells including plant cells that are intact in plants and/or parts of plants, plant protoplasts, plant tissues, plant cell tissue cultures, plant calli, plant clumps, and the like. As used herein, “shoot” refers to the above ground parts including the leaves and stems. Further, as used herein, “plant cell” refers to a structural and physiological unit of the plant, which comprises a cell wall and also may refer to a protoplast. A plant cell can be in the form of an isolated single cell or can be a cultured cell or can be a part of a higher-organized unit such as, for example, a plant tissue or a plant organ.

[0210] Non-limiting examples of plants useful with the present invention include turf grasses (e.g., bluegrass, bentgrass, ryegrass, fescue), feather reed grass, tufted hair grass, miscanthus, arundo, switchgrass, vegetable crops, including artichokes, kohlrabi, arugula, leeks, asparagus, lettuce (e.g., head, leaf, romaine), malanga, melons (e.g., muskmelon, watermelon, crenshaw, honeydew, cantaloupe), cole crops (e.g., brussels sprouts, cabbage, cauliflower, broccoli, collards, kale, Chinese cabbage, bok choy), cardoni, carrots, napa, okra, onions, celery, parsley, chick peas, parsnips, chicory, peppers, potatoes, cucurbits (e.g., marrow, cucumber, zucchini, squash, pumpkin, honeydew melon, watermelon, cantaloupe), radishes, dry bulb onions, rutabaga, eggplant, salsify, escarole, shallots, endive, garlic, spinach, green onions, squash, greens, beet (sugar beet and fodder beet), sweet potatoes, chard, horseradish, tomatoes, turnips, and spices; a fruit crop such as apples, apricots, cherries, nectarines, peaches, pears, plums, prunes, cherry, quince, fig, nuts (e.g., chestnuts, pecans, pistachios, hazelnuts, pistachios, peanuts, walnuts, macadamia nuts, almonds, and the like), citrus (e.g., clementine, kumquat, orange, grapefruit, tangerine, mandarin, lemon, lime, and the like), blueberries, black raspberries, boysenberries, cranberries, currants, gooseberries, loganberries, raspberries, strawberries, blackberries, grapes (wine and table), avocados, bananas, kiwi, persimmons, pomegranate, pineapple, tropical fruits, pomes, melon, mango, papaya, and lychee, a field crop plant such as clover, alfalfa, timothy, evening primrose, meadow foam, corn/maize (field, sweet, popcorn), hops, jojoba, buckwheat, safflower, quinoa, wheat, rice, barley, rye, millet, sorghum, oats, triticale, sorghum, tobacco, kapok, a leguminous plant (beans (e.g., green and dried), lentils, peas, soybeans), an oil plant (rape, canola, mustard, poppy, olive, sunflower, coconut, castor oil plant, cocoa bean, groundnut, oil palm), duckweed, Arabidopsis, a fiber plant (cotton, flax, hemp, jute), Cannabis (e.g., Cannabis sativa, Cannabis indica, and Cannabis ruderalis), lauraceae (cinnamon, camphor), or a plant such as coffee, sugar cane, tea, and natural rubber plants; and/or a bedding plant such as a flowering plant, a cactus, a succulent and/or an ornamental plant (e.g., roses, tulips, violets), as well as trees such as forest trees (broad-leaved trees and evergreens, such as conifers; e.g., elm, ash, oak, maple, fir, spruce, cedar, pine, birch, cypress, eucalyptus, willow), as well as shrubs and other nursery stock. In some embodiments, the nucleic acid constructs of the invention and/or expression cassettes and/or vectors encoding the same may be used to modify maize, soybean, wheat, canola, rice, tomato, pepper, sunflower, raspberry, blackberry, black raspberry and/or cherry.

[0211] In some embodiments, the invention provides cells (e.g., plant cells, animal cells, bacterial cells, archaeon cells, and the like) comprising the polypeptides, polynucleotides, nucleic acid constructs, expression cassettes or vectors of the invention.

[0212] The present invention further comprises a kit or kits to carry out the methods of this invention. A kit of this invention can comprise reagents, buffers, and apparatus for mixing, measuring, sorting, labeling, etc., as well as instructions and the like as would be appropriate for modifying a target nucleic acid.

[0213] In some embodiments, the invention provides a kit for comprising one or more nucleic acid constructs of the invention, and/or expression cassettes and/or vectors and/or cells comprising the same as described herein, with optional instructions for the use thereof. In some embodiments, a kit may further comprise a CRISPR-Cas guide nucleic acid (corresponding to an engineered protein, which may be encoded by a polynucleotide of the invention) and/or expression cassettes and/or vectors and or cells comprising the same. In some embodiments, a guide nucleic acid may be provided on the same expression cassette and/or vector as one or more nucleic acid constructs of the invention. In some embodiments, the guide nucleic acid may be provided on a separate expression cassette or vector from that comprising the one or more nucleic acid constructs of the invention.

[0214] Accordingly, in some embodiments, kits are provided comprising a nucleic acid construct comprising (a) a polynucleotide(s) as provided herein and (b) a promoter that drives expression of the polynucleotide(s) of (a). In some embodiments, the kit may further comprise a nucleic acid construct encoding a guide nucleic acid, wherein the construct comprises a cloning site for cloning of a nucleic acid sequence identical or complementary to a target nucleic acid sequence into backbone of the guide nucleic acid.

[0215] In some embodiments, the nucleic acid construct of the invention may be an mRNA that may encode one or more introns within the encoded polynucleotide(s). In some embodiments, the nucleic acid constructs of the invention, and/or an expression cassettes and/or vectors comprising the same, may further encode one or more selectable markers useful for identifying transformants (e.g., a nucleic acid encoding an antibiotic resistance gene, herbicide resistance gene, and the like).

[0216] A polypeptide, polynucleotide, nucleic acid construct, expression cassette, vector, composition, kit, system and/or cell of the present invention may comprise all or a portion of a sequence of one or more of SEQ ID NOs:1-175. In some embodiments, a polypeptide, polynucleotide, nucleic acid construct, expression cassette, vector, composition, kit, system and/or cell of the present invention may comprise at least about 20%, 25%, 30%, 35%, 40%, 45%, 50%, 55%, 60%, 65%, 70%, 75%, 80%, 85%, 90%, 95%, 96%, 97%, 98%, 99%, or more consecutive amino acids of a sequence of one or more of SEQ ID NOs:1-175.

[0217] The invention will now be described with reference to the following examples. It should be appreciated that these examples are not intended to limit the scope of the claims to the invention, but are rather intended to be exemplary of certain embodiments. Any variations in the exemplified methods that occur to the skilled artisan are intended to fall within the scope of the invention.

### EXAMPLES

### Example 1

[0218] Using existing domain annotations along with visual inspection of the SpCas9 crystal structure (PDB ID 4UN3) in PyMOL (The PyMOL Molecular Graphics System, Version 2.0. Schrodinger, LLC), the full HNH domain from SpCas9 (FIG. 3) was first identified and its residue boundaries determined. The domain is largely resolved in the crystal structure, but several residues connecting the N terminus of the HNH domain to the Rec1 domain are unresolved in the crystal structure. The location of Cas9 target DNA strand cleavage site relative to the HNH domain was also noted. This relative orientation was mimicked in subsequent rational positioning of the HNH domain relative to the target DNA strand of Cas12a.

[0219] The crystal structure of the LbCas12a ternary complex (PDB ID 5XUS) was next examined to locate an accessible region of the target DNA strand. Although the side of the target DNA/crRNA duplex closest to the RuvC domain is heavily shielded by other Cas12a domains, there is an exposed portion of the target DNA (indicated by the left arrow in FIG. 4) on the opposite side of the protein at the interface between the Rec1 and Rec2 domains (FIG. 4). A linker (indicated by the right arrow in FIG. 4) connecting the two domains sits adjacent to this exposed site and has few interactions with other residues in LbCas12a; this linker was chosen as a candidate site for domain insertion.

[0220] To determine the precise placement of the SpCas9 HNH domain relative to LbCas12a, the exposed DNA bases in the groove between the Rec1 and Rec2 domains of LbCas12a were next identified. Then, treating the HNH domain and its target DNA (four bases with two on each side of the cleavage site) as a unit, alignments of the HNH target DNA to the exposed target strand of LbCas12a were tested in a sliding window using PyMOL until an alignment was identified that would place the HNH domain near the insertion loop and would minimize clashes with other domains of LbCas12a. The position of the HNH domain was then adjusted manually using PyMOL to minimize clashes between HNH and Cas12a.

[0221] The final selected position of the HNH domain is shown in FIG. 5. While the C terminus of the HNH domain is very close to the C terminal end of the insertion loop, the HNH N terminus is relatively far from the insertion loop; however, this structure does not include the unstructured residues linking the SpCas9 Rec1 and HNH domains. A highly conserved hairpin in this region that interacts with the target DNA/crRNA duplex was further identified as a potential site for later design.

[0222] To prepare the Cas12a-HNH fusion structure for computational linker modeling, the N terminus of the HNH domain was initially extended by appending residues from SpCas9 that connect the Rec1 and HNH domains (and which are unresolved in the SpCas9 crystal structure) using PyMOL. The resulting structure was exported and prepared for linker modeling using custom Python scripts that inserted the HNH domain residues into possible insertion sites throughout the insertion loop as shown in Table 1.

TABLE 1
Results of preliminary computational screening
of possible insertion sites in Cas12a.

| | # successful | |
|---|---|---|
| | closures/10 | |
| Insertion Site | attempts | Observations |
| 282 | 0 | |
| 283 | 0 | |
| 284 | 0 | |
| 285 | 3 | |
| 286 | 0 | |
| 287 | 1 | |
| 288 | 3 | When loop closure does occur, it would |
| | | likely offer little flexibility for the |
| | | N-terminal linker. The C-terminal linker |
| | | seems long enough to be flexible. |
| 289 | 2 | |
| 290 | 0 | |
| 291 | 9 | Insertion in a flexible location between |
| | | glycine and glutamate residues |
| 292 | 9 | Insertion in a flexible location between |
| | | glutamate and glycine residues |
| 293 | 6 | Insertion would be immediately before a |
| | | tyrosine that interacts with other |
| | | Cas12a residues |

[0223] A rapid computational screen was then performed to test the ability of the HNH domain termini to connect to the two ends of the linker cut site using the Rosetta Remodel protocol (Huang P. S. et al 2011) included in the Rosetta macromolecular modeling software package. For each insertion point, ten iterations of loop closure (with no sequence design or insertions) were performed. The number of times that the linkers were able to successfully connect out of those ten iterations were tallied and compared (Table 1). Two of these insertion sites were then selected for more thorough linker modeling, including variations in linker lengths, based on a combination of their rate of successful loop closure and manual inspection (shown in bold in Table 1).

[0224] For the two selected insertion sites, fine-grained testing was then performed with small (2 to 4 residue) glycine-serine insertions or deletions in the N-terminal and C-terminal linkers and with more thorough sampling (100 iterations each). Possible residues for deletion were selected based on manual inspection of the sequence. Based on the linker modeling results, eight designs (four for each insertion site) were selected for experimental testing including extensions of 0, 2, or 4 residues of the N-terminal linker and extensions of 0 or 2 residues of the C-terminal linker.

### Example 2

[0225] DNA coding regions for 8 LbCas12a-HNH constructs (HNH-3287, HNH-3288, HNH-3289, HNH-3290, HNH-3296, HNH-3297, HNH-3298, and HNH-3299) were synthesized with a 6-Histidine tag using solid state synthesis. The coding regions were coned into a pET28a plasmid (Novagen) behind an inducible T7 promoter and transfected into BL21(DE3)-Star cells (Invitrogen) and plated on kanamycin. Single colonies were grown in 30 ml of Luria Broth at 37° C. to an A600 optical density of 0.5. 500 mM IPTG was added and the temperature was lowered to 18° C. for 18 hours of expression. Cells were pelleted and lysed with BugBuster Master Mix (Millipore) according to the manufacturer's directions. Cell debris was pelleted and a soluble fraction was imaged on a 4-12% Bis-Tis PAGE gel (Invitrogen) under reducing conditions, and visualized using Coomassie staining. All eight HNH constructs showed soluble protein expression at the approximate MW of 160 kDa (FIG. 6, arrow).

[0226] Soluble protein expression for all eight constructs containing HNH nuclease in the middle of the Cas12a protein speaks to the quality of the fusion designs. Large domain insertions into the middle of proteins often results in insoluble protein expression or no expression in Escherichia coli. The observation of all eight proteins being highly expressed suggests the chimeric protein is folding properly and has not led to the disruption of either protein folds.

[0227] The expression protocol was repeated to generate proteins suitable for nuclease assays. After pelleting the eight constructs, the E. coli cells were frozen, thawed, and were suspended in Buffer A (20 mM HEPES-KOH pH 7.5, 500 mM NaCl, 10% glycerol, 2 mM TCEP, and 10 mM Imidazole pH 7.5). 0.3 mg/ml lysozyme was added, and the cells were incubated at room temperature for 20 minutes, followed by sonication (QSonica) with a ⅛-inch tip, 25% power, 10 second bursts followed by 30 second rests for 2.25 minutes. Cell debris was pelleted, and the supernatant was loaded onto Ni-NTA Agarose (Bio-Rad), washed with 20 mM imidazole in buffer A, and eluted with 300 mM imidazole in Buffer A. Approximate concentrations of proteins were 0.5 to 2 mg/ml (estimated by NanoDrop A280 absorbances) in a total eluate of 200 μL.

### Example 3

[0228] A plasmid-based assay was used to assess nicking activity by purified HNH-3287, HNH-3288, HNH-3289, HNH-3290, HNH-3296, HNH-3297, and HNH-3298. Plasmid nicking assays work on the principle that supercoiled plasmids extracted from bacteria run smaller on agarose gels than linearized, double-cut plasmid. Furthermore, if only one strand is nicked the plasmid runs even larger than linearized plasmid. This assay has been used extensively in the CRISPR field to assess if an enzyme is a double-stranded nuclease or a single-stranded nuclease (Jinek et al., Science. 2012 Aug. 17; 337(6096):816-21) (Zetsche et al., Cell. 2015 Oct. 22; 163(3):759-71).

[0229] The sequence 5′-TTTAGGAAT CCCTTCTGC AGCACCTGG-3′ (SEQ ID NO:123), where the protospacer-adjacent motif (PAM) is in bold, was synthesized and cloned into a pUC18 plasmid. The plasmid was expressed in DH5a cells and purified using plasmid miniprep kits (Qiagen). CRISPR RNA molecules were synthesized (Synthego) without any chemical modifications with the sequence 5′-AAUUUCUACU AAGUGUAGAU GGAAUCCCUU CUGCAGCACC UGG-3′ (SEQ ID NO:124) where the portion complimentary to the plasmid is emboldened. 30 μL reactions were assembled with a 10:10:1 RNA:Protein:Plasmid ratio, incubated for 15 minutes at 37° C., heat-inactivated at 85° C. for 2 minutes, and loaded on a 1% agarose gel containing 1/100 v/v SYBR-Safe stain (Invitrogen).

[0230] Proteins tested were wildtype LbCas12a (wtLbCas12a), LbCas12a-R1138A, and the various chimeric HNH proteins. The R1138A is a point mutation in LbCas12a which corresponds to a known non-template strand nickase mutation for AsCas12a (R1226A) (Yamano T, et al. Cell. 2016 May 5; 165(4):949-62). Concentrations tested were 33 nM for wtLbCas12a and LbCas12a-R1138. A lower 9 nM was used for the various HNH constructs to distinguish the most active nucleases by being somewhat near the expected Kd rather than generating complete nicking.

[0231] The resulting gel (FIG. 7) indicates that HNH-3287, HNH-3288, HNH-3289, HNH-3290, HNH-3296, HNH-3297, and HNH-3298 are all nickases with percentages of nicking from −25% efficiency to ˜75% efficiency (upper bands, the nicked plasmids, compared to lower bands, the supercoiled plasmids) at these low 9 nM protein concentrations. Longer incubations or higher concentrations result in complete nicking, but do not allow for comparing relative mutant activities. Chimera HNH-3298 appears to have the highest percentage of nicking activity with 9 nM [protein] for 15 minutes at 37° C.

### Example 4

### Methods

### Protein Expression and Purification

[0232] For initial testing of expression and activity, His-tagged proteins, SYN3287 (SEQ ID NO:125), SYN3288 (SEQ ID NO:126), SYN3289 (SEQ ID NO:127), SYN3290 (SEQ ID NO:128), SYN3296 (SEQ ID NO:129), SYN3297 (SEQ ID NO:130), SYN3298 (SEQ ID NO:131), and SYN3299 (SEQ ID NO:132), were expressed in BL21 cells in 30 mL cultures. Each of the proteins included an active HNH domain and an inactivated RuvC domain. Cells were pelleted, frozen overnight, and lysed by sonication. Proteins were then crudely purified from the lysate using HisPur™ Ni-NTA Spin Columns.

[0233] For assays of SYN3298 and SYN3289, proteins were expressed in the same way with the following changes: proteins were expressed in 1 L cultures and purified using HisTrap-HF columns by FPLC. Fractions containing the protein of interest were further purified by cation exchange and stored in 50% glycerol.

### Plasmid Nickase Assay

[0234] To determine the activity of purified proteins as nickases or nucleases, 30 μL reactions were prepared containing 1× NEBuffer 3.1, 100 femtomoles of the DNA substrate, and equal parts purified protein and an appropriate guide RNA (1 picomole of each unless otherwise noted). Reactions were incubated at 37° C. for 30 minutes, stopped by a 20 minute Proteinase K digestion at room temperature, and separated on a 1% agarose gel. The target site for the plasmid nickase assay had a sequence of SEQ ID NO:133.

### Fluorescent Nickase Assay

[0235] DNA substrates were produced by annealing one labeled (SEQ ID NO:134) and one unlabeled (SEQ ID NO:135) DNA strand to produce substrates labeled with Cy5 either on the PAM-containing or non-PAM-containing strand. The spacer for this assay included a sequence of SEQ ID NO:150. Nicking reactions were prepared as described for the plasmid nickase assay an incubated at 37° C. for 30 minutes. Reactions were stopped by digesting samples with Proteinase K for 10 minutes. All samples were then mixed with urea loading buffer to 1× concentration and heated to 90° C. for 5 minutes to denature the substrates. Samples were separated by running on a 6% TBE Urea gel at 4° C. and 100V.

### HEK293T Cell Transfection

[0236] Eukaryotic HEK293T (ATCC CRL-3216) cells were cultured in Dulbecco's Modified Eagle's Medium plus GlutaMax (ThermoFisher) supplemented with 10% (v/v) FBS (FBS), at 37° C. with 5% C02. Protein components were synthesized using gene synthesis and subsequently cloned into plasmids with a CMV promoter. Guide RNAs were cloned with a human U6 promoter. HEK293T cells were seeded on 48-well collagen-coated BioCoat plates (Corning). Cells were transfected at about 70% confluency. 375 ng of CRISPR plasmid and 125 ng of guide RNA expression plasmids were transfected using 1.5 μl of Lipofectamine 3000 (ThermoFisher Scientific) per well according to the manufacturer's protocol. Genomic DNA from transfected cells were obtained after 3 days and indels were detected and quantified using high-throughput Illumina amplicon sequencing.

[0237] To determine which strand the designed proteins preferentially nick, pairs of guides were designed such that a Cas9 guide and a guide for the designed proteins on the same strand would cut close to each other (within ˜10 bp). Each tested design was paired with either a nuclease-dead SpCas9, a SpCas9 D10A target strand nickase, or a SpCas9 H840A nontarget strand nickase. If the synthetic nickase and its paired Cas9 nickase cut opposite strands, then a greater editing frequency was expected than if they cut the same strand due to the production of double-stranded breaks.

### Results

[0238] His-Tagged Designed Synthetic Nickases were Successfully Expressed in BL21 E. coli.

[0239] After crude purification of the designed nickases as described above, all samples showed a band at the expected size (˜160 kDa) as shown in FIG. 8, indicating that the nickases were solubly expressed in E. Coli.

Initial Plasmid Nicking Activity Observed from Crude Purifications of Synthetic Nickases.

[0240] Plasmid nickase assays were performed as described in the methods section above using the crude nickase purifications shown in FIG. 8. Due to low yields from some of the purifications, all designed nickases were tested at low concentrations so that they could be compared directly. As can be seen in FIG. 9, all but one of the designs showed a band indicating the presence of nicked plasmid that was more prominent than in the negative control sample, suggesting that the designs are capable of nicking a DNA substrate.

### RNA Dependence of Plasmid Nicking Using Crudely Purified Synthetic Nickases.

[0241] To ensure that the observed nicking and cleavage of the plasmid were guide-dependent and not due to random nuclease activity, the plasmid nickase assay was repeated for selected designs in both the presence of a targeting crRNA. Designs SYN3288, SYN3296, and SYN3298 all showed a reduction in the amount of uncleaved plasmid present in the presence of crRNA as can be seen in FIG. 10, indicating that their nuclease activity is RNA-dependent.

### Plasmid Nicking Activity of Purified Synthetic Nickase SYN3298.

[0242] Different quantities of protein+guide were tested relative to the concentration of LbCas12a control used (e.g. 30× indicates that 30 picomoles of protein and guide were included in the reaction). Nicking and, to a lesser extent, cleavage of the plasmid were observed at all tested concentrations of SYN3298 (FIG. 11), confirming that this design acts as a DNA nickase.

### Fluorescent Nickase Assay Using Purified Synthetic Nickases SYN3298 and SYN3289.

[0243] Substrates with a fluorescent Cy5 label on either the target (FIG. 12) or the nontarget (FIG. 13) were incubated with the designed nickases (which included an active HNH domain and an inactivated RuvC domain), LbCas12a, or the LbCas12a R1138a mutant (a nontarget strand nickase) and separated on a denaturing TBE-Urea gel. A shift in the position of the labeled band indicates that that strand was cleaved. FIG. 14 shows a portion of the gel for the samples incubated with the labeled target strand, FIG. 15 shows a portion of the gel for the samples incubated with the labeled non-target strand, and FIG. 16 shows the entire gel with lanes for the controls, the samples incubated with the labeled target strand (the boxed lanes denoted as “a)”), and the samples incubated with the labeled non-target strand (the boxed lanes denoted as “b)”). SYN3298 shows bands at the expected location for a cleaved substrate for the target DNA strand but not the nontarget DNA strand, indicating that it acts as a target strand nickase.

### Sequence-Based Strand-Specific Nickase Assay of Genomic DNA in HEK293T Cells.

[0244] Synthetic nickases were co-transfected with nearby Cas9 nickases (e.g., Cas9(H840A) or Cas9(D10A) cutting either the target strand (e.g., Cas9(D10A)) or nontarget strand (e.g., Cas9(H840A)). Information on the spacers used in the sequence based, strand specific nickase assay is provided in Table 2. Upstream guide refers to which spacer would be expected to cut closer to the 5′ end of the PAM-containing DNA strand. Estimated distance between the cut sites was determined based on the predicted cut site for each native nuclease domain.

TABLE 2
Spacer information for the sequence based, strand specific nickase assay.

| | | | Estimated | | |
|---|---|---|---|---|---|
| | | Cas12a/synthetic | distance | | |
| | Cas9 spacer | nickase | between cut | | Upstream |
| Target | sequence | spacer sequence | sites | | guide |
| RUNX1 | GCATTTTCAGGAG | CAGGAGGAAGCGATGG | 7-12 | bp | Cas9 |
| | GAAGCGA | CTTCAGA | | | |
| | (SEQ ID NO: 136) | (SEQ ID NO: 137) | | | |
| AAV1 | GTCCCCTCCACCC | TCTGTCCCCTCCACCCC | 2-7 | bp | Cas 12a/ |

| | | |
|---|---|---|
| CACAGTG | ACAGTG | synthetic |
| (SEQ ID NO: 138) | (SEQ ID NO: 139) | nuclease |

[0245] Editing efficiencies for each enzyme pair were normalized to the observed level of indels when the Cas9 nickase was paired with a nuclease-dead LbCas12a at the same target site (FIG. 17). Numbers in parentheses in FIG. 17 indicate the observed editing efficiencies prior to normalization. If the synthetic enzyme (SYN) (i.e., SYN3289, SYN3290, or SYN3298) preferentially cuts the target strand then (H480A::SYN)/(D10A::SYN)>1. If the synthetic enzyme (SYN) (i.e., SYN3289, SYN3290, or SYN3298) preferentially cuts the nontarget strand then (H480A::SYN)/(D10A::SYN)<1.

[0246] To determine which strand the designed proteins preferentially nick, pairs of guides were designed such that a Cas9 guide and a guide for the designed proteins on the same strand would cut close to each other (within ˜10 bp). Each tested design was paired with either a nuclease-dead SpCas9, a SpCas9 D10A target strand nickase, or a SpCas9 H840A nontarget strand nickase. If the synthetic nickase and its paired Cas9 nickase cut opposite strands, then a greater editing frequency was expected to be seen than if they cut the same strand due to the production of double-stranded breaks. Increased (about a 3-fold increase) indel frequency was consistently observed when all designed nickases were paired with a Cas9 nontarget strand nickase compared to a Cas9 target strand nickase, indicating that the designed nickases preferentially cut the target DNA strand.

### Example 5

[0247] Cytosine base editing data for base editors combining the A3A cytosine deaminase (SEQ ID NO:152) with SYN3289, SYN3290, or SYN3298 was obtained (FIGS. 18-21). Three architectures were tested for each enzyme: Fusion of A3A to the N-terminus of the synthetic enzyme using a linker (SEQ ID NO:22) along with fusion of UGI (SEQ ID NO:104) to the C-terminus of the synthetic enzyme using a linker of SEQ ID NO:45 to provide SEQ ID NOs:160-162; fusion of A3A to the N terminus of the synthetic enzyme using a previously published linker (SEQ ID NO:153; Li et al. Nat Biotechnol 36, 324-327 (2018)) along with fusion of UGI (SEQ ID NO:104) to the C-terminus of the synthetic enzyme using a linker of SEQ ID NO:154 to provide SEQ ID NOs:163-165; or Suntag-based recruitment of UGI (SEQ ID NO:104) fused to the C-terminus of A3A (SEQ ID NO:152) to provide SEQ ID NO:156 recruited to the peptide tagged synthetic enzyme of one of SEQ ID NOs:157-159. All percentages shown in FIGS. 18-21 indicate averages across three data points. All of the tested enzymes demonstrated cytosine base editing in all three of the tested configurations. The spacer for FIG. 18 was SEQ ID NO:144, the spacer for FIG. 19 was SEQ ID NO:145, spacer for FIG. 20 was SEQ ID NO:146, and the spacer for FIG. 21 was SEQ ID NO:147.

### Example 6

[0248] Adenine base editing data for synthetic enzymes SYN3289, SYN3290, and SYN3298 as N-terminal fusions to the TadA8e adenine deaminase was obtained (FIGS. 22-23). The synthetic enzymes were fused to TadA8e (SEQ ID NO:155) using a linker (SEQ ID NO:47) to provide SEQ ID NOs:166-168. All percentages shown in FIGS. 22-23 indicate averages across three data points. The three tested designs all demonstrated adenine base editing activity when fused with TadA8e. The spacer for FIG. 22 was SEQ ID NO:148 and the spacer for FIG. 23 was SEQ ID NO:149.

[0249] The foregoing is illustrative of the present invention, and is not to be construed as limiting thereof. The invention is defined by the following claims, with equivalents of the claims to be included therein.

1. An engineered Cas effector protein comprising at least two different polypeptides,
wherein one of the at least two different polypeptides is a first CRISPR-Cas effector polypeptide that is a first portion of a first Type V CRISPR-Cas effector protein and the first CRISPR-Cas effector polypeptide is devoid of a nuclease domain; and
wherein another of the least two different polypeptides is a heterologous polypeptide that is heterologous to the first Type V CRISPR-Cas effector protein and is not a portion of a Type V CRISPR-Cas effector protein.

2. (canceled)

3. The engineered Cas effector protein of claim 1, wherein the heterologous polypeptide comprises a first nuclease domain or a portion thereof that is heterologous to the first CRISPR-Cas effector polypeptide.

4. The engineered Cas effector protein of claim 1, wherein the heterologous polypeptide comprises a target strand nickase domain or a portion thereof.

5. The engineered Cas effector protein of claim 1, further comprising a second CRISPR-Cas effector polypeptide that comprises a second nuclease domain or a portion thereof.

6. The engineered Cas effector protein of claim 5, wherein the heterologous polypeptide is heterologous to the second CRISPR-Cas effector polypeptide.

7. The engineered Cas effector protein of claim 5, wherein the first and second CRISPR-Cas effector polypeptides are each a portion of the same CRISPR-Cas effector protein.

8-10. (canceled)

11. The engineered Cas effector protein of claim 1, wherein the heterologous polypeptide comprises a HNH domain.

12. The engineered Cas effector protein of claim 5, wherein the first and second CRISPR-Cas effector polypeptides are each a portion of a first CRISPR-Cas effector protein and the heterologous polypeptide is between and/or linked to two amino acids that are two consecutive or nonconsecutive amino acids of the first CRISPR-Cas effector protein.

13. The engineered Cas effector protein of claim 12, wherein the heterologous polypeptide is positioned in the engineered Cas effector protein in a location that corresponds to an interdomain linker region of the first CRISPR-Cas effector protein.

14. The engineered Cas effector protein of claim 1, wherein the heterologous polypeptide comprises an amino acid sequence having at least 70%, 75%, 80%, 85%, 90%, 95%, 96%, 97%, 98%, 99%, or more sequence identity to one or more of SEQ ID NOs:1 or 169-174.

15. (canceled)

16. The engineered Cas effector protein of claim 1, further comprising all or a portion of a wedge domain, a Rec1 domain, a Rec2 domain, a PAM-interacting domain, a RuvC domain, a bridge helix, and/or a Nuc domain of the first Type V CRISPR-Cas effector protein.

17. The engineered Cas effector protein of claim 16, wherein the engineered Cas effector protein comprises the Rec domain and the Rec2 domain and the heterologous polypeptide is between the Rec1 domain and the Rec2 domain.

18.-21. (canceled)

22. The engineered Cas effector protein of claim 1, wherein the engineered Cas effector protein comprises an amino acid sequence having about 70%, 75%, 80%, 85%, 90%, 95%, 96%, 97%, 98%, 99%, or more sequence identity to the amino acid sequence of a wild-type CRISPR-Cas effector protein.

23. The engineered Cas effector protein of claim 1, wherein the engineered Cas effector protein comprises an amino acid sequence having about 70%, 75%, 80%, 85%, 90%, 95%, 96%, 97%, 98%, 99%, or more sequence identity to any one of SEQ ID NOs:2-17, 125-132, or 157-168.

24.-46. (canceled)

47. An engineered Cas effector protein comprising:
a first polypeptide that is a first portion of a first Type V CRISPR-Cas effector protein;
a second polypeptide that is a second portion of the first Type V CRISPR-Cas effector protein; and
a heterologous polypeptide that is heterologous to the first Type V CRISPR-Cas effector protein,
wherein the heterologous polypeptide is between the first and second polypeptides and the heterologous polypeptide is positioned in the engineered Cas effector protein in a location that corresponds to an interdomain linker region of the first Type V CRISPR-Cas effector protein.

48. The engineered Cas effector protein of claim 47, wherein the interdomain linker region comprises one or more amino acids of amino acid residues 283-293 of SEQ ID NO:50 or of corresponding amino acid residues for a sequence that is optimally aligned to SEQ ID NO:50.

49. The engineered Cas effector protein of claim 47, wherein first polypeptide comprises all or a portion of a wedge domain and/or a Rec1 domain of the first Type V CRISPR-Cas effector protein; and/or
the second polypeptide comprises all or a portion of a wedge domain, a Rec2 domain, a PAM-interacting domain, a RuvC domain, a bridge helix, and/or a Nuc domain of the first Type V CRISPR-Cas effector protein.

50. The engineered Cas effector protein of claim 49, wherein the engineered Cas effector protein comprises the Rec1 domain and the Rec2 domain and the heterologous polypeptide is between the Rec1 domain and the Rec2 domain.

51. (canceled)

52. The engineered Cas effector protein of claim 47, wherein the heterologous polypeptide comprises a target strand nickase domain or a portion thereof.

53. The engineered Cas effector protein of claim 47, wherein the second polypeptide comprises a nuclease domain or a portion thereof.

54.-74. (canceled)

The application's sequence listing, which the Patent Office published only in electronic form, follows.

SEQUENCE LISTING (175 sequences)

SEQ ID NO: 1 - protein, 144 aa, Streptococcus sp.
ENQTTQKGQKNSRERMKRIEEGIKELGSQILKEHPVENTQLQNEKLYLYYLQNGRDMYVDQELDINRLSDYDVDHIVPQSFLKDDSIDNKVLTRSDKNRGKSDNVPSEEVVKKMKNYWRQLLNAKLITQRKFDNLTKAERGGLS

SEQ ID NO: 2 - protein, 1373 aa, Artificial sequence
  Synthetic polypeptide
MGSKLEKFTNCYSLSKTLRFKAIPVGKTQENIDNKRLLVEDEKRAEDYKGVKKLLDRYYLSFINDVLHSIKLKNLNNYISLFRKKTRTEKENKELENLEINLRKEIAKAFKGNEGYKSLFKKDIIETILPEFLDDKDEIALVNSFNGFTTAFTGFFDNRENMFSEEAKSTSIAFRCINENLTRYISNMDIFEKVDAIFDKHEVQEIKEKILNSDYDVEDFFEGEFFNFVLTQEGIDVYNAIIGGFVTESGEKIKGLNEYINLYNQKTKQKLPKFKPLYKQVLSDRESLSFYGENQTTQKGQKNSRERMKRIEEGIKELGSQILKEHPVENTQLQNEKLYLYYLQNGRDMYVDQELDINRLSDYDVDHIVPQSFLKDDSIDNKVLTRSDKNRGKSDNVPSEEVVKKMKNYWRQLLNAKLITQRKFDNLTKAERGGLSEGYTSDEEVLEVFRNTLNKNSEIFSSIKKLEKLFKNFDEYSSAGIFVKNGPAISTISKDIFGEWNVIRDKWNAEYDDIHLKKKAVVTEKYEDDRRKSFKKIGSFSLEQLQEYADADLSVVEKLKEIIIQKVDEIYKVYGSSEKLFDADFVLEKSLKKNDAVVAIMKDLLDSVKSFENYIKAFFGEGKETNRDESFYGDFVLAYDILLKVDHIYDAIRNYVTQKPYSKDKFKLYFQNPQFMGGWDKDKETDYRATILRYGSKYYLAIMDKKYAKCLQKIDKDDVNGNYEKINYKLLPGPNKMLPKVFFSKKWMAYYNPSEDIQKIYKNGTFKKGDMFNLNDCHKLIDFFKDSISRYPKWSNAYDFNFSETEKYKDIAGFYREVEEQGYKVSFESASKKEVDKLVEEGKLYMFQIYNKDFSDKSHGTPNLHTMYFKLLFDENNHGQIRLSGGAELFMRRASLKKEELVVHPANSPIANKNPDNPKKTTTLSYDVYKDKRFSEDQYELHIPIAINKCPKNIFKINTEVRVLLKHDDNPYVIGIARGERNLLYIVVVDGKGNIVEQYSLNEIINNFNGIRIKTDYHSLLDKKEKERFEARQNWTSIENIKELKAGYISQVVHKICELVEKYDAVIALEDLNSGFKNSRVKVEKQVYQKFEKMLIDKLNYMVDKKSNPCATGGALKGYQITNKFESFKSMSTQNGFIFYIPAWLTSKIDPSTGFVNLLKTKYTSIADSKKFISSFDRIMYVPEEDLFEFALDYKNFSRTDADYIKKWKLYSYGNRIRIFRNPKKNNVFDWEEVCLTSAYKELFNKYGINYQQGDIRALLCEQSDKAFYSSFMALMSLMLQMRNSITGRTDVDFLISPVKNSDGIFYDSRNYEAQENAILPKNADANGAYNIARKVLWAIGQFKKAEDEKLDKVKIAISNKEWLEYAQTSVKH

SEQ ID NO: 3 - protein, 1375 aa, Artificial sequence
  Synthetic polypeptide
MGSKLEKFTNCYSLSKTLRFKAIPVGKTQENIDNKRLLVEDEKRAEDYKGVKKLLDRYYLSFINDVLHSIKLKNLNNYISLFRKKTRTEKENKELENLEINLRKEIAKAFKGNEGYKSLFKKDIIETILPEFLDDKDEIALVNSFNGFTTAFTGFFDNRENMFSEEAKSTSIAFRCINENLTRYISNMDIFEKVDAIFDKHEVQEIKEKILNSDYDVEDFFEGEFFNFVLTQEGIDVYNAIIGGFVTESGEKIKGLNEYINLYNQKTKQKLPKFKPLYKQVLSDRESLSFYGSGENQTTQKGQKNSRERMKRIEEGIKELGSQILKEHPVENTQLQNEKLYLYYLQNGRDMYVDQELDINRLSDYDVDHIVPQSFLKDDSIDNKVLTRSDKNRGKSDNVPSEEVVKKMKNYWRQLLNAKLITQRKFDNLTKAERGGLSEGYTSDEEVLEVFRNTLNKNSEIFSSIKKLEKLFKNFDEYSSAGIFVKNGPAISTISKDIFGEWNVIRDKWNAEYDDIHLKKKAVVTEKYEDDRRKSFKKIGSFSLEQLQEYADADLSVVEKLKEIIIQKVDEIYKVYGSSEKLFDADFVLEKSLKKNDAVVAIMKDLLDSVKSFENYIKAFFGEGKETNRDESFYGDFVLAYDILLKVDHIYDAIRNYVTQKPYSKDKFKLYFQNPQFMGGWDKDKETDYRATILRYGSKYYLAIMDKKYAKCLQKIDKDDVNGNYEKINYKLLPGPNKMLPKVFFSKKWMAYYNPSEDIQKIYKNGTFKKGDMFNLNDCHKLIDFFKDSISRYPKWSNAYDFNFSETEKYKDIAGFYREVEEQGYKVSFESASKKEVDKLVEEGKLYMFQIYNKDFSDKSHGTPNLHTMYFKLLFDENNHGQIRLSGGAELFMRRASLKKEELVVHPANSPIANKNPDNPKKTTTLSYDVYKDKRFSEDQYELHIPIAINKCPKNIFKINTEVRVLLKHDDNPYVIGIARGERNLLYIVVVDGKGNIVEQYSLNEIINNFNGIRIKTDYHSLLDKKEKERFEARQNWTSIENIKELKAGYISQVVHKICELVEKYDAVIALEDLNSGFKNSRVKVEKQVYQKFEKMLIDKLNYMVDKKSNPCATGGALKGYQITNKFESFKSMSTQNGFIFYIPAWLTSKIDPSTGFVNLLKTKYTSIADSKKFISSFDRIMYVPEEDLFEFALDYKNFSRTDADYIKKWKLYSYGNRIRIFRNPKKNNVFDWEEVCLTSAYKELFNKYGINYQQGDIRALLCEQSDKAFYSSFMALMSLMLQMRNSITGRTDVDFLISPVKNSDGIFYDSRNYEAQENAILPKNADANGAYNIARKVLWAIGQFKKAEDEKLDKVKIAISNKEWLEYAQTSVKH

SEQ ID NO: 4 - protein, 1377 aa, Artificial sequence
  Synthetic polypeptide
MGSKLEKFTNCYSLSKTLRFKAIPVGKTQENIDNKRLLVEDEKRAEDYKGVKKLLDRYYLSFINDVLHSIKLKNLNNYISLFRKKTRTEKENKELENLEINLRKEIAKAFKGNEGYKSLFKKDIIETILPEFLDDKDEIALVNSFNGFTTAFTGFFDNRENMFSEEAKSTSIAFRCINENLTRYISNMDIFEKVDAIFDKHEVQEIKEKILNSDYDVEDFFEGEFFNFVLTQEGIDVYNAIIGGFVTESGEKIKGLNEYINLYNQKTKQKLPKFKPLYKQVLSDRESLSFYGGSSGENQTTQKGQKNSRERMKRIEEGIKELGSQILKEHPVENTQLQNEKLYLYYLQNGRDMYVDQELDINRLSDYDVDHIVPQSFLKDDSIDNKVLTRSDKNRGKSDNVPSEEVVKKMKNYWRQLLNAKLITQRKFDNLTKAERGGLSEGYTSDEEVLEVFRNTLNKNSEIFSSIKKLEKLFKNFDEYSSAGIFVKNGPAISTISKDIFGEWNVIRDKWNAEYDDIHLKKKAVVTEKYEDDRRKSFKKIGSFSLEQLQEYADADLSVVEKLKEIIIQKVDEIYKVYGSSEKLFDADFVLEKSLKKNDAVVAIMKDLLDSVKSFENYIKAFFGEGKETNRDESFYGDFVLAYDILLKVDHIYDAIRNYVTQKPYSKDKFKLYFQNPQFMGGWDKDKETDYRATILRYGSKYYLAIMDKKYAKCLQKIDKDDVNGNYEKINYKLLPGPNKMLPKVFFSKKWMAYYNPSEDIQKIYKNGTFKKGDMFNLNDCHKLIDFFKDSISRYPKWSNAYDFNFSETEKYKDIAGFYREVEEQGYKVSFESASKKEVDKLVEEGKLYMFQIYNKDFSDKSHGTPNLHTMYFKLLFDENNHGQIRLSGGAELFMRRASLKKEELVVHPANSPIANKNPDNPKKTTTLSYDVYKDKRFSEDQYELHIPIAINKCPKNIFKINTEVRVLLKHDDNPYVIGIARGERNLLYIVVVDGKGNIVEQYSLNEIINNFNGIRIKTDYHSLLDKKEKERFEARQNWTSIENIKELKAGYISQVVHKICELVEKYDAVIALEDLNSGFKNSRVKVEKQVYQKFEKMLIDKLNYMVDKKSNPCATGGALKGYQITNKFESFKSMSTQNGFIFYIPAWLTSKIDPSTGFVNLLKTKYTSIADSKKFISSFDRIMYVPEEDLFEFALDYKNFSRTDADYIKKWKLYSYGNRIRIFRNPKKNNVFDWEEVCLTSAYKELFNKYGINYQQGDIRALLCEQSDKAFYSSFMALMSLMLQMRNSITGRTDVDFLISPVKNSDGIFYDSRNYEAQENAILPKNADANGAYNIARKVLWAIGQFKKAEDEKLDKVKIAISNKEWLEYAQTSVKH

SEQ ID NO: 5 - protein, 1379 aa, Artificial sequence
  Synthetic polypeptide
MGSKLEKFTNCYSLSKTLRFKAIPVGKTQENIDNKRLLVEDEKRAEDYKGVKKLLDRYYLSFINDVLHSIKLKNLNNYISLFRKKTRTEKENKELENLEINLRKEIAKAFKGNEGYKSLFKKDIIETILPEFLDDKDEIALVNSFNGFTTAFTGFFDNRENMFSEEAKSTSIAFRCINENLTRYISNMDIFEKVDAIFDKHEVQEIKEKILNSDYDVEDFFEGEFFNFVLTQEGIDVYNAIIGGFVTESGEKIKGLNEYINLYNQKTKQKLPKFKPLYKQVLSDRESLSFYGGSSGENQTTQKGQKNSRERMKRIEEGIKELGSQILKEHPVENTQLQNEKLYLYYLQNGRDMYVDQELDINRLSDYDVDHIVPQSFLKDDSIDNKVLTRSDKNRGKSDNVPSEEVVKKMKNYWRQLLNAKLITQRKFDNLTKAERGGLSGSEGYTSDEEVLEVFRNTLNKNSEIFSSIKKLEKLFKNFDEYSSAGIFVKNGPAISTISKDIFGEWNVIRDKWNAEYDDIHLKKKAVVTEKYEDDRRKSFKKIGSFSLEQLQEYADADLSVVEKLKEIIIQKVDEIYKVYGSSEKLFDADFVLEKSLKKNDAVVAIMKDLLDSVKSFENYIKAFFGEGKETNRDESFYGDFVLAYDILLKVDHIYDAIRNYVTQKPYSKDKFKLYFQNPQFMGGWDKDKETDYRATILRYGSKYYLAIMDKKYAKCLQKIDKDDVNGNYEKINYKLLPGPNKMLPKVFFSKKWMAYYNPSEDIQKIYKNGTFKKGDMFNLNDCHKLIDFFKDSISRYPKWSNAYDFNFSETEKYKDIAGFYREVEEQGYKVSFESASKKEVDKLVEEGKLYMFQIYNKDFSDKSHGTPNLHTMYFKLLFDENNHGQIRLSGGAELFMRRASLKKEELVVHPANSPIANKNPDNPKKTTTLSYDVYKDKRFSEDQYELHIPIAINKCPKNIFKINTEVRVLLKHDDNPYVIGIARGERNLLYIVVVDGKGNIVEQYSLNEIINNFNGIRIKTDYHSLLDKKEKERFEARQNWTSIENIKELKAGYISQVVHKICELVEKYDAVIALEDLNSGFKNSRVKVEKQVYQKFEKMLIDKLNYMVDKKSNPCATGGALKGYQITNKFESFKSMSTQNGFIFYIPAWLTSKIDPSTGFVNLLKTKYTSIADSKKFISSFDRIMYVPEEDLFEFALDYKNFSRTDADYIKKWKLYSYGNRIRIFRNPKKNNVFDWEEVCLTSAYKELFNKYGINYQQGDIRALLCEQSDKAFYSSFMALMSLMLQMRNSITGRTDVDFLISPVKNSDGIFYDSRNYEAQENAILPKNADANGAYNIARKVLWAIGQFKKAEDEKLDKVKIAISNKEWLEYAQTSVKH

SEQ ID NO: 6 - protein, 1373 aa, Artificial sequence
  Synthetic polypeptide
MGSKLEKFTNCYSLSKTLRFKAIPVGKTQENIDNKRLLVEDEKRAEDYKGVKKLLDRYYLSFINDVLHSIKLKNLNNYISLFRKKTRTEKENKELENLEINLRKEIAKAFKGNEGYKSLFKKDIIETILPEFLDDKDEIALVNSFNGFTTAFTGFFDNRENMFSEEAKSTSIAFRCINENLTRYISNMDIFEKVDAIFDKHEVQEIKEKILNSDYDVEDFFEGEFFNFVLTQEGIDVYNAIIGGFVTESGEKIKGLNEYINLYNQKTKQKLPKFKPLYKQVLSDRESLSFYGEENQTTQKGQKNSRERMKRIEEGIKELGSQILKEHPVENTQLQNEKLYLYYLQNGRDMYVDQELDINRLSDYDVDHIVPQSFLKDDSIDNKVLTRSDKNRGKSDNVPSEEVVKKMKNYWRQLLNAKLITQRKFDNLTKAERGGLSGYTSDEEVLEVFRNTLNKNSEIFSSIKKLEKLFKNFDEYSSAGIFVKNGPAISTISKDIFGEWNVIRDKWNAEYDDIHLKKKAVVTEKYEDDRRKSFKKIGSFSLEQLQEYADADLSVVEKLKEIIIQKVDEIYKVYGSSEKLFDADFVLEKSLKKNDAVVAIMKDLLDSVKSFENYIKAFFGEGKETNRDESFYGDFVLAYDILLKVDHIYDAIRNYVTQKPYSKDKFKLYFQNPQFMGGWDKDKETDYRATILRYGSKYYLAIMDKKYAKCLQKIDKDDVNGNYEKINYKLLPGPNKMLPKVFFSKKWMAYYNPSEDIQKIYKNGTFKKGDMFNLNDCHKLIDFFKDSISRYPKWSNAYDFNFSETEKYKDIAGFYREVEEQGYKVSFESASKKEVDKLVEEGKLYMFQIYNKDFSDKSHGTPNLHTMYFKLLFDENNHGQIRLSGGAELFMRRASLKKEELVVHPANSPIANKNPDNPKKTTTLSYDVYKDKRFSEDQYELHIPIAINKCPKNIFKINTEVRVLLKHDDNPYVIGIARGERNLLYIVVVDGKGNIVEQYSLNEIINNFNGIRIKTDYHSLLDKKEKERFEARQNWTSIENIKELKAGYISQVVHKICELVEKYDAVIALEDLNSGFKNSRVKVEKQVYQKFEKMLIDKLNYMVDKKSNPCATGGALKGYQITNKFESFKSMSTQNGFIFYIPAWLTSKIDPSTGFVNLLKTKYTSIADSKKFISSFDRIMYVPEEDLFEFALDYKNFSRTDADYIKKWKLYSYGNRIRIFRNPKKNNVFDWEEVCLTSAYKELFNKYGINYQQGDIRALLCEQSDKAFYSSFMALMSLMLQMRNSITGRTDVDFLISPVKNSDGIFYDSRNYEAQENAILPKNADANGAYNIARKVLWAIGQFKKAEDEKLDKVKIAISNKEWLEYAQTSVKH

SEQ ID NO: 7 - protein, 1375 aa, Artificial sequence
  Synthetic polypeptide
MGSKLEKFTNCYSLSKTLRFKAIPVGKTQENIDNKRLLVEDEKRAEDYKGVKKLLDRYYLSFINDVLHSIKLKNLNNYISLFRKKTRTEKENKELENLEINLRKEIAKAFKGNEGYKSLFKKDIIETILPEFLDDKDEIALVNSFNGFTTAFTGFFDNRENMFSEEAKSTSIAFRCINENLTRYISNMDIFEKVDAIFDKHEVQEIKEKILNSDYDVEDFFEGEFFNFVLTQEGIDVYNAIIGGFVTESGEKIKGLNEYINLYNQKTKQKLPKFKPLYKQVLSDRESLSFYGEGSENQTTQKGQKNSRERMKRIEEGIKELGSQILKEHPVENTQLQNEKLYLYYLQNGRDMYVDQELDINRLSDYDVDHIVPQSFLKDDSIDNKVLTRSDKNRGKSDNVPSEEVVKKMKNYWRQLLNAKLITQRKFDNLTKAERGGLSGYTSDEEVLEVFRNTLNKNSEIFSSIKKLEKLFKNFDEYSSAGIFVKNGPAISTISKDIFGEWNVIRDKWNAEYDDIHLKKKAVVTEKYEDDRRKSFKKIGSFSLEQLQEYADADLSVVEKLKEIIIQKVDEIYKVYGSSEKLFDADFVLEKSLKKNDAVVAIMKDLLDSVKSFENYIKAFFGEGKETNRDESFYGDFVLAYDILLKVDHIYDAIRNYVTQKPYSKDKFKLYFQNPQFMGGWDKDKETDYRATILRYGSKYYLAIMDKKYAKCLQKIDKDDVNGNYEKINYKLLPGPNKMLPKVFFSKKWMAYYNPSEDIQKIYKNGTFKKGDMFNLNDCHKLIDFFKDSISRYPKWSNAYDFNFSETEKYKDIAGFYREVEEQGYKVSFESASKKEVDKLVEEGKLYMFQIYNKDFSDKSHGTPNLHTMYFKLLFDENNHGQIRLSGGAELFMRRASLKKEELVVHPANSPIANKNPDNPKKTTTLSYDVYKDKRFSEDQYELHIPIAINKCPKNIFKINTEVRVLLKHDDNPYVIGIARGERNLLYIVVVDGKGNIVEQYSLNEIINNFNGIRIKTDYHSLLDKKEKERFEARQNWTSIENIKELKAGYISQVVHKICELVEKYDAVIALEDLNSGFKNSRVKVEKQVYQKFEKMLIDKLNYMVDKKSNPCATGGALKGYQITNKFESFKSMSTQNGFIFYIPAWLTSKIDPSTGFVNLLKTKYTSIADSKKFISSFDRIMYVPEEDLFEFALDYKNFSRTDADYIKKWKLYSYGNRIRIFRNPKKNNVFDWEEVCLTSAYKELFNKYGINYQQGDIRALLCEQSDKAFYSSFMALMSLMLQMRNSITGRTDVDFLISPVKNSDGIFYDSRNYEAQENAILPKNADANGAYNIARKVLWAIGQFKKAEDEKLDKVKIAISNKEWLEYAQTSVKH

SEQ ID NO: 8 - protein, 1377 aa, Artificial sequence
  Synthetic polypeptide
MGSKLEKFTNCYSLSKTLRFKAIPVGKTQENIDNKRLLVEDEKRAEDYKGVKKLLDRYYLSFINDVLHSIKLKNLNNYISLFRKKTRTEKENKELENLEINLRKEIAKAFKGNEGYKSLFKKDIIETILPEFLDDKDEIALVNSFNGFTTAFTGFFDNRENMFSEEAKSTSIAFRCINENLTRYISNMDIFEKVDAIFDKHEVQEIKEKILNSDYDVEDFFEGEFFNFVLTQEGIDVYNAIIGGFVTESGEKIKGLNEYINLYNQKTKQKLPKFKPLYKQVLSDRESLSFYGEGSSGENQTTQKGQKNSRERMKRIEEGIKELGSQILKEHPVENTQLQNEKLYLYYLQNGRDMYVDQELDINRLSDYDVDHIVPQSFLKDDSIDNKVLTRSDKNRGKSDNVPSEEVVKKMKNYWRQLLNAKLITQRKFDNLTKAERGGLSGYTSDEEVLEVFRNTLNKNSEIFSSIKKLEKLFKNFDEYSSAGIFVKNGPAISTISKDIFGEWNVIRDKWNAEYDDIHLKKKAVVTEKYEDDRRKSFKKIGSFSLEQLQEYADADLSVVEKLKEIIIQKVDEIYKVYGSSEKLFDADFVLEKSLKKNDAVVAIMKDLLDSVKSFENYIKAFFGEGKETNRDESFYGDFVLAYDILLKVDHIYDAIRNYVTQKPYSKDKFKLYFQNPQFMGGWDKDKETDYRATILRYGSKYYLAIMDKKYAKCLQKIDKDDVNGNYEKINYKLLPGPNKMLPKVFFSKKWMAYYNPSEDIQKIYKNGTFKKGDMFNLNDCHKLIDFFKDSISRYPKWSNAYDFNFSETEKYKDIAGFYREVEEQGYKVSFESASKKEVDKLVEEGKLYMFQIYNKDFSDKSHGTPNLHTMYFKLLFDENNHGQIRLSGGAELFMRRASLKKEELVVHPANSPIANKNPDNPKKTTTLSYDVYKDKRFSEDQYELHIPIAINKCPKNIFKINTEVRVLLKHDDNPYVIGIARGERNLLYIVVVDGKGNIVEQYSLNEIINNFNGIRIKTDYHSLLDKKEKERFEARQNWTSIENIKELKAGYISQVVHKICELVEKYDAVIALEDLNSGFKNSRVKVEKQVYQKFEKMLIDKLNYMVDKKSNPCATGGALKGYQITNKFESFKSMSTQNGFIFYIPAWLTSKIDPSTGFVNLLKTKYTSIADSKKFISSFDRIMYVPEEDLFEFALDYKNFSRTDADYIKKWKLYSYGNRIRIFRNPKKNNVFDWEEVCLTSAYKELFNKYGINYQQGDIRALLCEQSDKAFYSSFMALMSLMLQMRNSITGRTDVDFLISPVKNSDGIFYDSRNYEAQENAILPKNADANGAYNIARKVLWAIGQFKKAEDEKLDKVKIAISNKEWLEYAQTSVKH

SEQ ID NO: 9 - protein, 1379 aa, Artificial sequence
  Synthetic polypeptide
MGSKLEKFTNCYSLSKTLRFKAIPVGKTQENIDNKRLLVEDEKRAEDYKGVKKLLDRYYLSFINDVLHSIKLKNLNNYISLFRKKTRTEKENKELENLEINLRKEIAKAFKGNEGYKSLFKKDIIETILPEFLDDKDEIALVNSFNGFTTAFTGFFDNRENMFSEEAKSTSIAFRCINENLTRYISNMDIFEKVDAIFDKHEVQEIKEKILNSDYDVEDFFEGEFFNFVLTQEGIDVYNAIIGGFVTESGEKIKGLNEYINLYNQKTKQKLPKFKPLYKQVLSDRESLSFYGEGSSGENQTTQKGQKNSRERMKRIEEGIKELGSQILKEHPVENTQLQNEKLYLYYLQNGRDMYVDQELDINRLSDYDVDHIVPQSFLKDDSIDNKVLTRSDKNRGKSDNVPSEEVVKKMKNYWRQLLNAKLITQRKFDNLTKAERGGLSGSGYTSDEEVLEVFRNTLNKNSEIFSSIKKLEKLFKNFDEYSSAGIFVKNGPAISTISKDIFGEWNVIRDKWNAEYDDIHLKKKAVVTEKYEDDRRKSFKKIGSFSLEQLQEYADADLSVVEKLKEIIIQKVDEIYKVYGSSEKLFDADFVLEKSLKKNDAVVAIMKDLLDSVKSFENYIKAFFGEGKETNRDESFYGDFVLAYDILLKVDHIYDAIRNYVTQKPYSKDKFKLYFQNPQFMGGWDKDKETDYRATILRYGSKYYLAIMDKKYAKCLQKIDKDDVNGNYEKINYKLLPGPNKMLPKVFFSKKWMAYYNPSEDIQKIYKNGTFKKGDMFNLNDCHKLIDFFKDSISRYPKWSNAYDFNFSETEKYKDIAGFYREVEEQGYKVSFESASKKEVDKLVEEGKLYMFQIYNKDFSDKSHGTPNLHTMYFKLLFDENNHGQIRLSGGAELFMRRASLKKEELVVHPANSPIANKNPDNPKKTTTLSYDVYKDKRFSEDQYELHIPIAINKCPKNIFKINTEVRVLLKHDDNPYVIGIARGERNLLYIVVVDGKGNIVEQYSLNEIINNFNGIRIKTDYHSLLDKKEKERFEARQNWTSIENIKELKAGYISQVVHKICELVEKYDAVIALEDLNSGFKNSRVKVEKQVYQKFEKMLIDKLNYMVDKKSNPCATGGALKGYQITNKFESFKSMSTQNGFIFYIPAWLTSKIDPSTGFVNLLKTKYTSIADSKKFISSFDRIMYVPEEDLFEFALDYKNFSRTDADYIKKWKLYSYGNRIRIFRNPKKNNVFDWEEVCLTSAYKELFNKYGINYQQGDIRALLCEQSDKAFYSSFMALMSLMLQMRNSITGRTDVDFLISPVKNSDGIFYDSRNYEAQENAILPKNADANGAYNIARKVLWAIGQFKKAEDEKLDKVKIAISNKEWLEYAQTSVKH

SEQ ID NO: 10 - protein, 1373 aa, Artificial sequence
  Synthetic polypeptide
MGSKLEKFTNCYSLSKTLRFKAIPVGKTQENIDNKRLLVEDEKRAEDYKGVKKLLDRYYLSFINDVLHSIKLKNLNNYISLFRKKTRTEKENKELENLEINLRKEIAKAFKGNEGYKSLFKKDIIETILPEFLDDKDEIALVNSFNGFTTAFTGFFDNRENMFSEEAKSTSIAFRCINENLTRYISNMDIFEKVDAIFDKHEVQEIKEKILNSDYDVEDFFEGEFFNFVLTQEGIDVYNAIIGGFVTESGEKIKGLNEYINLYNQKTKQKLPKFKPLYKQVLSDRESLSFYGENQTTQKGQKNSRERMKRIEEGIKELGSQILKEHPVENTQLQNEKLYLYYLQNGRDMYVDQELDINRLSDYDVDHIVPQSFLKDDSIDNKVLTRSDKNRGKSDNVPSEEVVKKMKNYWRQLLNAKLITQRKFDNLTKAERGGLSEGYTSDEEVLEVFRNTLNKNSEIFSSIKKLEKLFKNFDEYSSAGIFVKNGPAISTISKDIFGEWNVIRDKWNAEYDDIHLKKKAVVTEKYEDDRRKSFKKIGSFSLEQLQEYADADLSVVEKLKEIIIQKVDEIYKVYGSSEKLFDADFVLEKSLKKNDAVVAIMKDLLDSVKSFENYIKAFFGEGKETNRDESFYGDFVLAYDILLKVDHIYDAIRNYVTQKPYSKDKFKLYFQNPQFMGGWDKDKETDYRATILRYGSKYYLAIMDKKYAKCLQKIDKDDVNGNYEKINYKLLPGPNKMLPKVFFSKKWMAYYNPSEDIQKIYKNGTFKKGDMFNLNDCHKLIDFFKDSISRYPKWSNAYDFNFSETEKYKDIAGFYREVEEQGYKVSFESASKKEVDKLVEEGKLYMFQIYNKDFSDKSHGTPNLHTMYFKLLFDENNHGQIRLSGGAELFMRRASLKKEELVVHPANSPIANKNPDNPKKTTTLSYDVYKDKRFSEDQYELHIPIAINKCPKNIFKINTEVRVLLKHDDNPYVIGIDRGERNLLYIVVVDGKGNIVEQYSLNEIINNFNGIRIKTDYHSLLDKKEKERFEARQNWTSIENIKELKAGYISQVVHKICELVEKYDAVIALEDLNSGFKNSRVKVEKQVYQKFEKMLIDKLNYMVDKKSNPCATGGALKGYQITNKFESFKSMSTQNGFIFYIPAWLTSKIDPSTGFVNLLKTKYTSIADSKKFISSFDRIMYVPEEDLFEFALDYKNFSRTDADYIKKWKLYSYGNRIRIFRNPKKNNVFDWEEVCLTSAYKELFNKYGINYQQGDIRALLCEQSDKAFYSSFMALMSLMLQMRNSITGRTDVDFLISPVKNSDGIFYDSRNYEAQENAILPKNADANGAYNIARKVLWAIGQFKKAEDEKLDKVKIAISNKEWLEYAQTSVKH

SEQ ID NO: 11 - protein, 1375 aa, Artificial sequence
  Synthetic polypeptide
MGSKLEKFTNCYSLSKTLRFKAIPVGKTQENIDNKRLLVEDEKRAEDYKGVKKLLDRYYLSFINDVLHSIKLKNLNNYISLFRKKTRTEKENKELENLEINLRKEIAKAFKGNEGYKSLFKKDIIETILPEFLDDKDEIALVNSFNGFTTAFTGFFDNRENMFSEEAKSTSIAFRCINENLTRYISNMDIFEKVDAIFDKHEVQEIKEKILNSDYDVEDFFEGEFFNFVLTQEGIDVYNAIIGGFVTESGEKIKGLNEYINLYNQKTKQKLPKFKPLYKQVLSDRESLSFYGSGENQTTQKGQKNSRERMKRIEEGIKELGSQILKEHPVENTQLQNEKLYLYYLQNGRDMYVDQELDINRLSDYDVDHIVPQSFLKDDSIDNKVLTRSDKNRGKSDNVPSEEVVKKMKNYWRQLLNAKLITQRKFDNLTKAERGGLSEGYTSDEEVLEVFRNTLNKNSEIFSSIKKLEKLFKNFDEYSSAGIFVKNGPAISTISKDIFGEWNVIRDKWNAEYDDIHLKKKAVVTEKYEDDRRKSFKKIGSFSLEQLQEYADADLSVVEKLKEIIIQKVDEIYKVYGSSEKLFDADFVLEKSLKKNDAVVAIMKDLLDSVKSFENYIKAFFGEGKETNRDESFYGDFVLAYDILLKVDHIYDAIRNYVTQKPYSKDKFKLYFQNPQFMGGWDKDKETDYRATILRYGSKYYLAIMDKKYAKCLQKIDKDDVNGNYEKINYKLLPGPNKMLPKVFFSKKWMAYYNPSEDIQKIYKNGTFKKGDMFNLNDCHKLIDFFKDSISRYPKWSNAYDFNFSETEKYKDIAGFYREVEEQGYKVSFESASKKEVDKLVEEGKLYMFQIYNKDFSDKSHGTPNLHTMYFKLLFDENNHGQIRLSGGAELFMRRASLKKEELVVHPANSPIANKNPDNPKKTTTLSYDVYKDKRFSEDQYELHIPIAINKCPKNIFKINTEVRVLLKHDDNPYVIGIDRGERNLLYIVVVDGKGNIVEQYSLNEIINNFNGIRIKTDYHSLLDKKEKERFEARQNWTSIENIKELKAGYISQVVHKICELVEKYDAVIALEDLNSGFKNSRVKVEKQVYQKFEKMLIDKLNYMVDKKSNPCATGGALKGYQITNKFESFKSMSTQNGFIFYIPAWLTSKIDPSTGFVNLLKTKYTSIADSKKFISSFDRIMYVPEEDLFEFALDYKNFSRTDADYIKKWKLYSYGNRIRIFRNPKKNNVFDWEEVCLTSAYKELFNKYGINYQQGDIRALLCEQSDKAFYSSFMALMSLMLQMRNSITGRTDVDFLISPVKNSDGIFYDSRNYEAQENAILPKNADANGAYNIARKVLWAIGQFKKAEDEKLDKVKIAISNKEWLEYAQTSVKH

SEQ ID NO: 12 - protein, 1377 aa, Artificial sequence
  Synthetic polypeptide
MGSKLEKFTNCYSLSKTLRFKAIPVGKTQENIDNKRLLVEDEKRAEDYKGVKKLLDRYYLSFINDVLHSIKLKNLNNYISLFRKKTRTEKENKELENLEINLRKEIAKAFKGNEGYKSLFKKDIIETILPEFLDDKDEIALVNSFNGFTTAFTGFFDNRENMFSEEAKSTSIAFRCINENLTRYISNMDIFEKVDAIFDKHEVQEIKEKILNSDYDVEDFFEGEFFNFVLTQEGIDVYNAIIGGFVTESGEKIKGLNEYINLYNQKTKQKLPKFKPLYKQVLSDRESLSFYGGSSGENQTTQKGQKNSRERMKRIEEGIKELGSQILKEHPVENTQLQNEKLYLYYLQNGRDMYVDQELDINRLSDYDVDHIVPQSFLKDDSIDNKVLTRSDKNRGKSDNVPSEEVVKKMKNYWRQLLNAKLITQRKFDNLTKAERGGLSEGYTSDEEVLEVFRNTLNKNSEIFSSIKKLEKLFKNFDEYSSAGIFVKNGPAISTISKDIFGEWNVIRDKWNAEYDDIHLKKKAVVTEKYEDDRRKSFKKIGSFSLEQLQEYADADLSVVEKLKEIIIQKVDEIYKVYGSSEKLFDADFVLEKSLKKNDAVVAIMKDLLDSVKSFENYIKAFFGEGKETNRDESFYGDFVLAYDILLKVDHIYDAIRNYVTQKPYSKDKFKLYFQNPQFMGGWDKDKETDYRATILRYGSKYYLAIMDKKYAKCLQKIDKDDVNGNYEKINYKLLPGPNKMLPKVFFSKKWMAYYNPSEDIQKIYKNGTFKKGDMFNLNDCHKLIDFFKDSISRYPKWSNAYDFNFSETEKYKDIAGFYREVEEQGYKVSFESASKKEVDKLVEEGKLYMFQIYNKDFSDKSHGTPNLHTMYFKLLFDENNHGQIRLSGGAELFMRRASLKKEELVVHPANSPIANKNPDNPKKTTTLSYDVYKDKRFSEDQYELHIPIAINKCPKNIFKINTEVRVLLKHDDNPYVIGIDRGERNLLYIVVVDGKGNIVEQYSLNEIINNFNGIRIKTDYHSLLDKKEKERFEARQNWTSIENIKELKAGYISQVVHKICELVEKYDAVIALEDLNSGFKNSRVKVEKQVYQKFEKMLIDKLNYMVDKKSNPCATGGALKGYQITNKFESFKSMSTQNGFIFYIPAWLTSKIDPSTGFVNLLKTKYTSIADSKKFISSFDRIMYVPEEDLFEFALDYKNFSRTDADYIKKWKLYSYGNRIRIFRNPKKNNVFDWEEVCLTSAYKELFNKYGINYQQGDIRALLCEQSDKAFYSSFMALMSLMLQMRNSITGRTDVDFLISPVKNSDGIFYDSRNYEAQENAILPKNADANGAYNIARKVLWAIGQFKKAEDEKLDKVKIAISNKEWLEYAQTSVKH

SEQ ID NO: 13 - protein, 1379 aa, Artificial sequence
  Synthetic polypeptide
MGSKLEKFTNCYSLSKTLRFKAIPVGKTQENIDNKRLLVEDEKRAEDYKGVKKLLDRYYLSFINDVLHSIKLKNLNNYISLFRKKTRTEKENKELENLEINLRKEIAKAFKGNEGYKSLFKKDIIETILPEFLDDKDEIALVNSFNGFTTAFTGFFDNRENMFSEEAKSTSIAFRCINENLTRYISNMDIFEKVDAIFDKHEVQEIKEKILNSDYDVEDFFEGEFFNFVLTQEGIDVYNAIIGGFVTESGEKIKGLNEYINLYNQKTKQKLPKFKPLYKQVLSDRESLSFYGGSSGENQTTQKGQKNSRERMKRIEEGIKELGSQILKEHPVENTQLQNEKLYLYYLQNGRDMYVDQELDINRLSDYDVDHIVPQSFLKDDSIDNKVLTRSDKNRGKSDNVPSEEVVKKMKNYWRQLLNAKLITQRKFDNLTKAERGGLSGSEGYTSDEEVLEVFRNTLNKNSEIFSSIKKLEKLFKNFDEYSSAGIFVKNGPAISTISKDIFGEWNVIRDKWNAEYDDIHLKKKAVVTEKYEDDRRKSFKKIGSFSLEQLQEYADADLSVVEKLKEIIIQKVDEIYKVYGSSEKLFDADFVLEKSLKKNDAVVAIMKDLLDSVKSFENYIKAFFGEGKETNRDESFYGDFVLAYDILLKVDHIYDAIRNYVTQKPYSKDKFKLYFQNPQFMGGWDKDKETDYRATILRYGSKYYLAIMDKKYAKCLQKIDKDDVNGNYEKINYKLLPGPNKMLPKVFFSKKWMAYYNPSEDIQKIYKNGTFKKGDMFNLNDCHKLIDFFKDSISRYPKWSNAYDFNFSETEKYKDIAGFYREVEEQGYKVSFESASKKEVDKLVEEGKLYMFQIYNKDFSDKSHGTPNLHTMYFKLLFDENNHGQIRLSGGAELFMRRASLKKEELVVHPANSPIANKNPDNPKKTTTLSYDVYKDKRFSEDQYELHIPIAINKCPKNIFKINTEVRVLLKHDDNPYVIGIDRGERNLLYIVVVDGKGNIVEQYSLNEIINNFNGIRIKTDYHSLLDKKEKERFEARQNWTSIENIKELKAGYISQVVHKICELVEKYDAVIALEDLNSGFKNSRVKVEKQVYQKFEKMLIDKLNYMVDKKSNPCATGGALKGYQITNKFESFKSMSTQNGFIFYIPAWLTSKIDPSTGFVNLLKTKYTSIADSKKFISSFDRIMYVPEEDLFEFALDYKNFSRTDADYIKKWKLYSYGNRIRIFRNPKKNNVFDWEEVCLTSAYKELFNKYGINYQQGDIRALLCEQSDKAFYSSFMALMSLMLQMRNSITGRTDVDFLISPVKNSDGIFYDSRNYEAQENAILPKNADANGAYNIARKVLWAIGQFKKAEDEKLDKVKIAISNKEWLEYAQTSVKH

SEQ ID NO: 14 - protein, 1373 aa, Artificial sequence
  Synthetic polypeptide
MGSKLEKFTNCYSLSKTLRFKAIPVGKTQENIDNKRLLVEDEKRAEDYKGVKKLLDRYYLSFINDVLHSIKLKNLNNYISLFRKKTRTEKENKELENLEINLRKEIAKAFKGNEGYKSLFKKDIIETILPEFLDDKDEIALVNSFNGFTTAFTGFFDNRENMFSEEAKSTSIAFRCINENLTRYISNMDIFEKVDAIFDKHEVQEIKEKILNSDYDVEDFFEGEFFNFVLTQEGIDVYNAIIGGFVTESGEKIKGLNEYINLYNQKTKQKLPKFKPLYKQVLSDRESLSFYGEENQTTQKGQKNSRERMKRIEEGIKELGSQILKEHPVENTQLQNEKLYLYYLQNGRDMYVDQELDINRLSDYDVDHIVPQSFLKDDSIDNKVLTRSDKNRGKSDNVPSEEVVKKMKNYWRQLLNAKLITQRKFDNLTKAERGGLSGYTSDEEVLEVFRNTLNKNSEIFSSIKKLEKLFKNFDEYSSAGIFVKNGPAISTISKDIFGEWNVIRDKWNAEYDDIHLKKKAVVTEKYEDDRRKSFKKIGSFSLEQLQEYADADLSVVEKLKEIIIQKVDEIYKVYGSSEKLFDADFVLEKSLKKNDAVVAIMKDLLDSVKSFENYIKAFFGEGKETNRDESFYGDFVLAYDILLKVDHIYDAIRNYVTQKPYSKDKFKLYFQNPQFMGGWDKDKETDYRATILRYGSKYYLAIMDKKYAKCLQKIDKDDVNGNYEKINYKLLPGPNKMLPKVFFSKKWMAYYNPSEDIQKIYKNGTFKKGDMFNLNDCHKLIDFFKDSISRYPKWSNAYDFNFSETEKYKDIAGFYREVEEQGYKVSFESASKKEVDKLVEEGKLYMFQIYNKDFSDKSHGTPNLHTMYFKLLFDENNHGQIRLSGGAELFMRRASLKKEELVVHPANSPIANKNPDNPKKTTTLSYDVYKDKRFSEDQYELHIPIAINKCPKNIFKINTEVRVLLKHDDNPYVIGIDRGERNLLYIVVVDGKGNIVEQYSLNEIINNFNGIRIKTDYHSLLDKKEKERFEARQNWTSIENIKELKAGYISQVVHKICELVEKYDAVIALEDLNSGFKNSRVKVEKQVYQKFEKMLIDKLNYMVDKKSNPCATGGALKGYQITNKFESFKSMSTQNGFIFYIPAWLTSKIDPSTGFVNLLKTKYTSIADSKKFISSFDRIMYVPEEDLFEFALDYKNFSRTDADYIKKWKLYSYGNRIRIFRNPKKNNVFDWEEVCLTSAYKELFNKYGINYQQGDIRALLCEQSDKAFYSSFMALMSLMLQMRNSITGRTDVDFLISPVKNSDGIFYDSRNYEAQENAILPKNADANGAYNIARKVLWAIGQFKKAEDEKLDKVKIAISNKEWLEYAQTSVKH

SEQ ID NO: 15 - protein, 1375 aa, Artificial sequence
  Synthetic polypeptide
MGSKLEKFTNCYSLSKTLRFKAIPVGKTQENIDNKRLLVEDEKRAEDYKGVKKLLDRYYLSFINDVLHSIKLKNLNNYISLFRKKTRTEKENKELENLEINLRKEIAKAFKGNEGYKSLFKKDIIETILPEFLDDKDEIALVNSFNGFTTAFTGFFDNRENMFSEEAKSTSIAFRCINENLTRYISNMDIFEKVDAIFDKHEVQEIKEKILNSDYDVEDFFEGEFFNFVLTQEGIDVYNAIIGGFVTESGEKIKGLNEYINLYNQKTKQKLPKFKPLYKQVLSDRESLSFYGEGSENQTTQKGQKNSRERMKRIEEGIKELGSQILKEHPVENTQLQNEKLYLYYLQNGRDMYVDQELDINRLSDYDVDHIVPQSFLKDDSIDNKVLTRSDKNRGKSDNVPSEEVVKKMKNYWRQLLNAKLITQRKFDNLTKAERGGLSGYTSDEEVLEVFRNTLNKNSEIFSSIKKLEKLFKNFDEYSSAGIFVKNGPAISTISKDIFGEWNVIRDKWNAEYDDIHLKKKAVVTEKYEDDRRKSFKKIGSFSLEQLQEYADADLSVVEKLKEIIIQKVDEIYKVYGSSEKLFDADFVLEKSLKKNDAVVAIMKDLLDSVKSFENYIKAFFGEGKETNRDESFYGDFVLAYDILLKVDHIYDAIRNYVTQKPYSKDKFKLYFQNPQFMGGWDKDKETDYRATILRYGSKYYLAIMDKKYAKCLQKIDKDDVNGNYEKINYKLLPGPNKMLPKVFFSKKWMAYYNPSEDIQKIYKNGTFKKGDMFNLNDCHKLIDFFKDSISRYPKWSNAYDFNFSETEKYKDIAGFYREVEEQGYKVSFESASKKEVDKLVEEGKLYMFQIYNKDFSDKSHGTPNLHTMYFKLLFDENNHGQIRLSGGAELFMRRASLKKEELVVHPANSPIANKNPDNPKKTTTLSYDVYKDKRFSEDQYELHIPIAINKCPKNIFKINTEVRVLLKHDDNPYVIGIDRGERNLLYIVVVDGKGNIVEQYSLNEIINNFNGIRIKTDYHSLLDKKEKERFEARQNWTSIENIKELKAGYISQVVHKICELVEKYDAVIALEDLNSGFKNSRVKVEKQVYQKFEKMLIDKLNYMVDKKSNPCATGGALKGYQITNKFESFKSMSTQNGFIFYIPAWLTSKIDPSTGFVNLLKTKYTSIADSKKFISSFDRIMYVPEEDLFEFALDYKNFSRTDADYIKKWKLYSYGNRIRIFRNPKKNNVFDWEEVCLTSAYKELFNKYGINYQQGDIRALLCEQSDKAFYSSFMALMSLMLQMRNSITGRTDVDFLISPVKNSDGIFYDSRNYEAQENAILPKNADANGAYNIARKVLWAIGQFKKAEDEKLDKVKIAISNKEWLEYAQTSVKH

SEQ ID NO: 16 - protein, 1377 aa, Artificial sequence
  Synthetic polypeptide
MGSKLEKFTNCYSLSKTLRFKAIPVGKTQENIDNKRLLVEDEKRAEDYKGVKKLLDRYYLSFINDVLHSIKLKNLNNYISLFRKKTRTEKENKELENLEINLRKEIAKAFKGNEGYKSLFKKDIIETILPEFLDDKDEIALVNSFNGFTTAFTGFFDNRENMFSEEAKSTSIAFRCINENLTRYISNMDIFEKVDAIFDKHEVQEIKEKILNSDYDVEDFFEGEFFNFVLTQEGIDVYNAIIGGFVTESGEKIKGLNEYINLYNQKTKQKLPKFKPLYKQVLSDRESLSFYGEGSSGENQTTQKGQKNSRERMKRIEEGIKELGSQILKEHPVENTQLQNEKLYLYYLQNGRDMYVDQELDINRLSDYDVDHIVPQSFLKDDSIDNKVLTRSDKNRGKSDNVPSEEVVKKMKNYWRQLLNAKLITQRKFDNLTKAERGGLSGYTSDEEVLEVFRNTLNKNSEIFSSIKKLEKLFKNFDEYSSAGIFVKNGPAISTISKDIFGEWNVIRDKWNAEYDDIHLKKKAVVTEKYEDDRRKSFKKIGSFSLEQLQEYADADLSVVEKLKEIIIQKVDEIYKVYGSSEKLFDADFVLEKSLKKNDAVVAIMKDLLDSVKSFENYIKAFFGEGKETNRDESFYGDFVLAYDILLKVDHIYDAIRNYVTQKPYSKDKFKLYFQNPQFMGGWDKDKETDYRATILRYGSKYYLAIMDKKYAKCLQKIDKDDVNGNYEKINYKLLPGPNKMLPKVFFSKKWMAYYNPSEDIQKIYKNGTFKKGDMFNLNDCHKLIDFFKDSISRYPKWSNAYDFNFSETEKYKDIAGFYREVEEQGYKVSFESASKKEVDKLVEEGKLYMFQIYNKDFSDKSHGTPNLHTMYFKLLFDENNHGQIRLSGGAELFMRRASLKKEELVVHPANSPIANKNPDNPKKTTTLSYDVYKDKRFSEDQYELHIPIAINKCPKNIFKINTEVRVLLKHDDNPYVIGIDRGERNLLYIVVVDGKGNIVEQYSLNEIINNFNGIRIKTDYHSLLDKKEKERFEARQNWTSIENIKELKAGYISQVVHKICELVEKYDAVIALEDLNSGFKNSRVKVEKQVYQKFEKMLIDKLNYMVDKKSNPCATGGALKGYQITNKFESFKSMSTQNGFIFYIPAWLTSKIDPSTGFVNLLKTKYTSIADSKKFISSFDRIMYVPEEDLFEFALDYKNFSRTDADYIKKWKLYSYGNRIRIFRNPKKNNVFDWEEVCLTSAYKELFNKYGINYQQGDIRALLCEQSDKAFYSSFMALMSLMLQMRNSITGRTDVDFLISPVKNSDGIFYDSRNYEAQENAILPKNADANGAYNIARKVLWAIGQFKKAEDEKLDKVKIAISNKEWLEYAQTSVKH

SEQ ID NO: 17 - protein, 1379 aa, Artificial sequence
  Synthetic polypeptide
MGSKLEKFTNCYSLSKTLRFKAIPVGKTQENIDNKRLLVEDEKRAEDYKGVKKLLDRYYLSFINDVLHSIKLKNLNNYISLFRKKTRTEKENKELENLEINLRKEIAKAFKGNEGYKSLFKKDIIETILPEFLDDKDEIALVNSFNGFTTAFTGFFDNRENMFSEEAKSTSIAFRCINENLTRYISNMDIFEKVDAIFDKHEVQEIKEKILNSDYDVEDFFEGEFFNFVLTQEGIDVYNAIIGGFVTESGEKIKGLNEYINLYNQKTKQKLPKFKPLYKQVLSDRESLSFYGEGSSGENQTTQKGQKNSRERMKRIEEGIKELGSQILKEHPVENTQLQNEKLYLYYLQNGRDMYVDQELDINRLSDYDVDHIVPQSFLKDDSIDNKVLTRSDKNRGKSDNVPSEEVVKKMKNYWRQLLNAKLITQRKFDNLTKAERGGLSGSGYTSDEEVLEVFRNTLNKNSEIFSSIKKLEKLFKNFDEYSSAGIFVKNGPAISTISKDIFGEWNVIRDKWNAEYDDIHLKKKAVVTEKYEDDRRKSFKKIGSFSLEQLQEYADADLSVVEKLKEIIIQKVDEIYKVYGSSEKLFDADFVLEKSLKKNDAVVAIMKDLLDSVKSFENYIKAFFGEGKETNRDESFYGDFVLAYDILLKVDHIYDAIRNYVTQKPYSKDKFKLYFQNPQFMGGWDKDKETDYRATILRYGSKYYLAIMDKKYAKCLQKIDKDDVNGNYEKINYKLLPGPNKMLPKVFFSKKWMAYYNPSEDIQKIYKNGTFKKGDMFNLNDCHKLIDFFKDSISRYPKWSNAYDFNFSETEKYKDIAGFYREVEEQGYKVSFESASKKEVDKLVEEGKLYMFQIYNKDFSDKSHGTPNLHTMYFKLLFDENNHGQIRLSGGAELFMRRASLKKEELVVHPANSPIANKNPDNPKKTTTLSYDVYKDKRFSEDQYELHIPIAINKCPKNIFKINTEVRVLLKHDDNPYVIGIDRGERNLLYIVVVDGKGNIVEQYSLNEIINNFNGIRIKTDYHSLLDKKEKERFEARQNWTSIENIKELKAGYISQVVHKICELVEKYDAVIALEDLNSGFKNSRVKVEKQVYQKFEKMLIDKLNYMVDKKSNPCATGGALKGYQITNKFESFKSMSTQNGFIFYIPAWLTSKIDPSTGFVNLLKTKYTSIADSKKFISSFDRIMYVPEEDLFEFALDYKNFSRTDADYIKKWKLYSYGNRIRIFRNPKKNNVFDWEEVCLTSAYKELFNKYGINYQQGDIRALLCEQSDKAFYSSFMALMSLMLQMRNSITGRTDVDFLISPVKNSDGIFYDSRNYEAQENAILPKNADANGAYNIARKVLWAIGQFKKAEDEKLDKVKIAISNKEWLEYAQTSVKH

SEQ ID NO: 18 - protein, 36 aa, Artificial sequence
  Synthetic peptide
EKSKNDRSKPQPSDDRDRQPPSGEDYPEWKAPGEYE

SEQ ID NO: 19 - protein, 34 aa, Artificial sequence
  Synthetic peptide
QEPKPQDQSSEVPPPPGSQKPGTKEPHDSKSSGP

SEQ ID NO: 20 - protein, 34 aa, Artificial sequence
  Synthetic peptide
PDNSSGQKLQLPQPSDKPQDSREKSDSLPSDKRD

SEQ ID NO: 21 - protein, 36 aa, Artificial sequence
  Synthetic peptide
PDNSTLQTLQLPQPTPSSTDTQQTSDTDPEDTTDVI

SEQ ID NO: 22 - protein, 30 aa, Artificial sequence
  Synthetic peptide
STSQSDGSSVPADIDQSSDSDQSSSQGQPG

SEQ ID NO: 23 - protein, 14 aa, Artificial sequence
  Synthetic peptide
AKPDDESQKPPQDD

SEQ ID NO: 24 - protein, 14 aa, Artificial sequence
  Synthetic peptide
LQLEPGPTTPEYPI

SEQ ID NO: 25 - protein, 14 aa, Artificial sequence
  Synthetic peptide
IQLPPSDTTPENPI

SEQ ID NO: 26 - protein, 12 aa, Artificial sequence
  Synthetic peptide
ESNDNSQVPPSL

SEQ ID NO: 27 - protein, 10 aa, Artificial sequence
  Synthetic peptide
SEQQEYPGSG

SEQ ID NO: 28 - protein, 10 aa, Artificial sequence
  Synthetic peptide
NNSEQQENPA

SEQ ID NO: 29 - protein, 12 aa, Artificial sequence
  Synthetic peptide
STDGSGQPKHKP

SEQ ID NO: 30 - protein, 20 aa, Artificial sequence
  Synthetic peptide
PKPSSESGERYEQQPEPPPP

SEQ ID NO: 31 - protein, 16 aa, Artificial sequence
  Synthetic peptide
KGGGGEPDEKRPSQSS

SEQ ID NO: 32 - protein, 14 aa, Artificial sequence
  Synthetic peptide
YAGGTPKEPPPPNS

SEQ ID NO: 33 - protein, 14 aa, Artificial sequence
  Synthetic peptide
PLVAGGTPFEPPPP

SEQ ID NO: 34 - protein, 14 aa, Artificial sequence
  Synthetic peptide
PQPDERSQIPDNKE

SEQ ID NO: 35 - protein, 10 aa, Artificial sequence
  Synthetic peptide
YTDEKPLPRS

SEQ ID NO: 36 - protein, 12 aa, Artificial sequence
  Synthetic peptide
SHPPQEPPQSNL

SEQ ID NO: 37 - protein, 16 aa, Artificial sequence
  Synthetic peptide
SESPSKQQPEPKSSKG

SEQ ID NO: 38 - protein, 16 aa, Artificial sequence
  Synthetic peptide
SESPTNQQPEPQWTTD

SEQ ID NO: 39 - protein, 16 aa, Artificial sequence
  Synthetic peptide
GGSKGPPPSPPPPQPE

SEQ ID NO: 40 - protein, 16 aa, Artificial sequence
  Synthetic peptide
GPLPAPPPQPPPPQPN

SEQ ID NO: 41 - protein, 14 aa, Artificial sequence
  Synthetic peptide
RPLPHDNNKQDYSK

SEQ ID NO: 42 - protein, 61 aa, Artificial sequence
  Synthetic peptide
  MISC_FEATURE (5)..(6): Xaa is present or absent and when present is Gly
  MISC_FEATURE (7)..(7): Xaa is present or absent and when present is Ser
  MISC_FEATURE (8)..(9): Xaa is present or absent and when present is Gly
  MISC_FEATURE (10)..(10): Xaa is present or absent and when present is Ser
  MISC_FEATURE (11)..(12): Xaa is present or absent and when present is Gly
  MISC_FEATURE (13)..(13): Xaa is present or absent and when present is Ser
  MISC_FEATURE (14)..(15): Xaa is present or absent and when present is Gly
  MISC_FEATURE (16)..(16): Xaa is present or absent and when present is Ser
  MISC_FEATURE (17)..(18): Xaa is present or absent and when present is Gly
  MISC_FEATURE (19)..(19): Xaa is present or absent and when present is Ser
  MISC_FEATURE (20)..(21): Xaa is present or absent and when present is Gly
  MISC_FEATURE (22)..(22): Xaa is present or absent and when present is Ser
  MISC_FEATURE (23)..(24): Xaa is present or absent and when present is Gly
  MISC_FEATURE (25)..(25): Xaa is present or absent and when present is Ser
  MISC_FEATURE (26)..(27): Xaa is present or absent and when present is Gly
  MISC_FEATURE (28)..(28): Xaa is present or absent and when present is Ser
  MISC_FEATURE (29)..(30): Xaa is present or absent and when present is Gly
  MISC_FEATURE (31)..(31): Xaa is present or absent and when present is Ser
  MISC_FEATURE (32)..(33): Xaa is present or absent and when present is Gly
  MISC_FEATURE (34)..(34): Xaa is present or absent and when present is Ser
  MISC_FEATURE (35)..(36): Xaa is present or absent and when present is Gly
  MISC_FEATURE (37)..(37): Xaa is present or absent and when present is Ser
  MISC_FEATURE (38)..(39): Xaa is present or absent and when present is Gly
  MISC_FEATURE (40)..(40): Xaa is present or absent and when present is Ser
  MISC_FEATURE (41)..(42): Xaa is present or absent and when present is Gly
  MISC_FEATURE (43)..(43): Xaa is present or absent and when present is Ser
  MISC_FEATURE (44)..(45): Xaa is present or absent and when present is Gly
  MISC_FEATURE (46)..(46): Xaa is present or absent and when present is Ser
  MISC_FEATURE (47)..(48): Xaa is present or absent and when present is Gly
  MISC_FEATURE (49)..(49): Xaa is present or absent and when present is Ser
  MISC_FEATURE (50)..(51): Xaa is present or absent and when present is Gly
  MISC_FEATURE (52)..(52): Xaa is present or absent and when present is Ser
  MISC_FEATURE (53)..(54): Xaa is present or absent and when present is Gly
  MISC_FEATURE (55)..(55): Xaa is present or absent and when present is Ser
  MISC_FEATURE (56)..(57): Xaa is present or absent and when present is Gly
  MISC_FEATURE (58)..(58): Xaa is present or absent and when present is Ser
  MISC_FEATURE (59)..(60): Xaa is present or absent and when present is Gly
  MISC_FEATURE (61)..(61): Xaa is present or absent and when present is Ser
SGGSXXXXXXXXXXXXXXXXXXXXXXXXXXXXXXXXXXXXXXXXXXXXXXXXXXXXXXXXX

SEQ ID NO: 43 - protein, 4 aa, Artificial sequence
  Synthetic peptide
SGGS

SEQ ID NO: 44 - protein, 100 aa, Artificial sequence
  Synthetic peptide
  MISC_FEATURE (6)..(9): Xaa is present or absent and when present is Gly
  MISC_FEATURE (10)..(10): Xaa is present or absent and when present is Ser
  MISC_FEATURE (11)..(14): Xaa is present or absent and when present is Gly
  MISC_FEATURE (15)..(15): Xaa is present or absent and when present is Ser
  MISC_FEATURE (16)..(19): Xaa is present or absent and when present is Gly
  MISC_FEATURE (20)..(20): Xaa is present or absent and when present is Ser
  MISC_FEATURE (21)..(24): Xaa is present or absent and when present is Gly
  MISC_FEATURE (25)..(25): Xaa is present or absent and when present is Ser
  MISC_FEATURE (26)..(29): Xaa is present or absent and when present is Gly
  MISC_FEATURE (30)..(30): Xaa is present or absent and when present is Ser
  MISC_FEATURE (31)..(34): Xaa is present or absent and when present is Gly
  MISC_FEATURE (35)..(35): Xaa is present or absent and when present is Ser
  MISC_FEATURE (36)..(39): Xaa is present or absent and when present is Gly
  MISC_FEATURE (40)..(40): Xaa is present or absent and when present is Ser
  MISC_FEATURE (41)..(44): Xaa is present or absent and when present is Gly
  MISC_FEATURE (45)..(45): Xaa is present or absent and when present is Ser
  MISC_FEATURE (46)..(49): Xaa is present or absent and when present is Gly
  MISC_FEATURE (50)..(50): Xaa is present or absent and when present is Ser
  MISC_FEATURE (51)..(54): Xaa is present or absent and when present is Gly
  MISC_FEATURE (55)..(55): Xaa is present or absent and when present is Ser
  MISC_FEATURE (56)..(59): Xaa is present or absent and when present is Gly
  MISC_FEATURE (60)..(60): Xaa is present or absent and when present is Ser
  MISC_FEATURE (61)..(64): Xaa is present or absent and when present is Gly
  MISC_FEATURE (65)..(65): Xaa is present or absent and when present is Ser
  MISC_FEATURE (66)..(69): Xaa is present or absent and when present is Gly
  MISC_FEATURE (70)..(70): Xaa is present or absent and when present is Ser
  MISC_FEATURE (71)..(74): Xaa is present or absent and when present is Gly
  MISC_FEATURE (75)..(75): Xaa is present or absent and when present is Ser
  MISC_FEATURE (76)..(79): Xaa is present or absent and when present is Gly
  MISC_FEATURE (80)..(80): Xaa is present or absent and when present is Ser
  MISC_FEATURE (81)..(84): Xaa is present or absent and when present is Gly
  MISC_FEATURE (85)..(85): Xaa is present or absent and when present is Ser
  MISC_FEATURE (86)..(89): Xaa is present or absent and when present is Gly
  MISC_FEATURE (90)..(90): Xaa is present or absent and when present is Ser
  MISC_FEATURE (91)..(94): Xaa is present or absent and when present is Gly
  MISC_FEATURE (95)..(95): Xaa is present or absent and when present is Ser
  MISC_FEATURE (96)..(99): Xaa is present or absent and when present is Gly
  MISC_FEATURE (100)..(100): Xaa is present or absent and when present is Ser
GGGGSXXXXXXXXXXXXXXXXXXXXXXXXXXXXXXXXXXXXXXXXXXXXXXXXXXXXXXXXXXXXXXXXXXXXXXXXXXXXXXXXXXXXXXXXXXXXXXX

SEQ ID NO: 45 - protein, 10 aa, Artificial sequence
  Synthetic peptide
SGGSGGSGGS

SEQ ID NO: 46 - protein, 16 aa, Artificial sequence
  Synthetic peptide
SGSETPGTSESATPES

SEQ ID NO: 47 - protein, 32 aa, Artificial sequence
  Synthetic peptide
SGGSSGGSSGSETPGTSESATPESSGGSSGGS

SEQ ID NO: 48 - DNA, 1592 bp, Medicago truncatula
actgttaataatttttaaacgtcagcgcactaaaaaaacgaaaagacggacacgtgaaaataaaaaacacacactagtttatgacgcaatactattttacttatgatttgggtacattagacaaaaccgtgaaagagatgtatcagctatgaaacctgtatacttcaatacagagacttactcatatcggatacgtacgcacgaagtatcatattaattattttaatttttaataaatattttatcggatacttatgtgatactctacatatacacaaggatatttctaagatactttatagatacgtatcctagaaaaacatgaagagtaaaaaagtgagacaatgttgtaaaaattcattataaatgtatatgattcaattttagatatgcatcagtataattgattctcgatgaaacacttaaaattatatttcttgtggaagaacgtagcgagagaggtgattcagttagacaacattaaataaaattaatgttaagttcttttaatgatgtttctctcaatatcacatcatatgaaaatgtaatatgatttataagaaaatttttaaaaaatttattttaataatcacatgtactattttttaaaaattgtatcttttataataatacaataataaagagtaatcagtgttaatttttcttcaaatataagttttattataaatcattgttaacgtatcataagtcattaccgtatcgtatcttaatttttttttaaaaaccgctaattcacgtacccgtattgtattgtacccgcacctgtatcacaatcgatcttagttagaagaattgtctcgaggcggtgcaagacagcatataatagacgtggactctcttataccaaacgttgtcgtatcacaaagggttaggtaacaagtcacagtttgtccacgtgtcacgttttaattggaagaggtgccgttggcgtaatataacagccaatcgatttttgctataaaagcaaatcaggtaaactaaacttcttcattcttttcttccccatcgctacaaaaccggttcctttggaaaagagattcattcaaacctagcacccaattccgtttcaaggtataatctactttctattcttcgattattttattattattagctactatcgtttaatcgatcttttcttttgatccgtcaaatttaaattcaattagggttttgttcttttctttcatctgattgaaatccttctgaattgaaccgtttacttgattttactgtttattgtatgatttaatcctttgtttttcaaagacagtctttagattgtgattaggggttcatataaatttttagatttggatttttgtattgtatgattcaaaaaatacgtcctttaattagattagtacatggatattttttacccgatttattgattgtcagggagaatttgatgagcaagtttttttgatgtctgttgtaaattgaattgattataattgctgatctgctgcttccagttttcataacccatattcttttaaccttgttgtacacacaatgaaaaattggtgattgattcatttgtttttctttgttttggattatacagg

SEQ ID NO: 49 - DNA, 2000 bp, Zea mays
gtcgtgcccctctctagagataaagagcattgcatgtctaaagtataaaaaattaccacatatttttttgtcacacttatttgaagtgtagtttatctatctctatacatatatttaaacttcactctacaaataatatagtctataatactaaaataatattagtgttttagaggatcatataaataaactgctagacatggtctaaaggataattgaatattttgacaatctacagttttatctttttagtgtgcatgtgatctctctgttttttttgcaaatagcttgacctatataatacttcatccattttattagtacatccatttaggatttagggttgatggtttctatagactaatttttagtacatccattttattctttttagtctctaaattttttaaaactaaaactctattttagttttttatttaataatttagatataaaatgaaataaaataaattgactacaaataaaacaaataccctttaagaaataaaaaaactaagcaaacatttttcttgtttcgagtagataatgacaggctgttcaacgccgtcgacgagtctaacggacaccaaccagcgaaccagcagcgtcgcgtcgggccaagcgaagcagacggcacggcatctctgtagctgcctctggacccctctcgagagttccgctccaccgttggacttgctccgctgtcggcatccagaaattgcgtggcggagcggcagacgtgaggcggcacggcaggcggcctcttcctcctctcacggcaccggcagctacgggggattcctttcccaccgctccttcgctttcccttcctcgcccgccgtaataaatagacaccccctccacaccctctttccccaacctcgtgttcgttcggagcgcacacacacgcaaccagatctcccccaaatccagccgtcggcacctccgcttcaaggtacgccgctcatcctccccccccccctctctctaccttctctagatcggcgatccggtccatggttagggcccggtagttctacttctgttcatgtttgtgttagagcaaacatgttcatgttcatgtttgtgatgatgtggtctggttgggcggtcgttctagatcggagtaggatactgtttcaagctacctggtggatttattaattttgtatctgtatgtgtgtgccatacatcttcatagttacgagtttaagatgatggatggaaatatcgatctaggataggtatacatgttgatgcgggttttactgatgcatatacagagatgctttttttctcgcttggttgtgatgatatggtctggttgggcggtcgttctagatcggagtagaatactgtttcaaactacctggtggatttattaaaggataaagggtcgttctagatcggagtagaatactgtttcaaactacctggtggatttattaaaggatctgtatgtatgtgcctacatcttcatagttacgagtttaagatgatggatggaaatatcgatctaggataggtatacatgttgatgcgggttttactgatgcatatacagagatgctttttttcgcttggttgtgatgatgtggtctggttgggcggtcgttctagatcggagtagaatactgtttcaaactacctggtggatttattaattttgtatctttatgtgtgtgccatacatcttcatagttacgagtttaagatgatggatggaaatattgatctaggataggtatacatgttgatgtgggttttactgatgcatatacatgatggcatatgcggcatctattcatatgctctaaccttgagtacctatctattataataaacaagtatgttttataattattttgatcttgatatacttggatgatggcatatgcagcagctatatgtggattttttagccctgccttcatacgctatttatttgcttggtactgtttcttttgtccgatgctcaccctgttgtttggtgatacttc

SEQ ID NO: 50 - protein, 1227 aa, Unknown
  Lachnospiraceae bacterium
SKLEKFTNCYSLSKTLRFKAIPVGKTQENIDNKRLLVEDEKRAEDYKGVKKLLDRYYLSFINDVLHSIKLKNLNNYISLFRKKTRTEKENKELENLEINLRKEIAKAFKGNEGYKSLFKKDIIETILPEFLDDKDEIALVNSFNGFTTAFTGFFDNRENMFSEEAKSTSIAFRCINENLTRYISNMDIFEKVDAIFDKHEVQEIKEKILNSDYDVEDFFEGEFFNFVLTQEGIDVYNAIIGGFVTESGEKIKGLNEYINLYNQKTKQKLPKFKPLYKQVLSDRESLSFYGEGYTSDEEVLEVFRNTLNKNSEIFSSIKKLEKLFKNFDEYSSAGIFVKNGPAISTISKDIFGEWNVIRDKWNAEYDDIHLKKKAVVTEKYEDDRRKSFKKIGSFSLEQLQEYADADLSVVEKLKEIIIQKVDEIYKVYGSSEKLFDADFVLEKSLKKNDAVVAIMKDLLDSVKSFENYIKAFFGEGKETNRDESFYGDFVLAYDILLKVDHIYDAIRNYVTQKPYSKDKFKLYFQNPQFMGGWDKDKETDYRATILRYGSKYYLAIMDKKYAKCLQKIDKDDVNGNYEKINYKLLPGPNKMLPKVFFSKKWMAYYNPSEDIQKIYKNGTFKKGDMFNLNDCHKLIDFFKDSISRYPKWSNAYDFNFSETEKYKDIAGFYREVEEQGYKVSFESASKKEVDKLVEEGKLYMFQIYNKDFSDKSHGTPNLHTMYFKLLFDENNHGQIRLSGGAELFMRRASLKKEELVVHPANSPIANKNPDNPKKTTTLSYDVYKDKRFSEDQYELHIPIAINKCPKNIFKINTEVRVLLKHDDNPYVIGIARGERNLLYIVVVDGKGNIVEQYSLNEIINNFNGIRIKTDYHSLLDKKEKERFEARQNWTSIENIKELKAGYISQVVHKICELVEKYDAVIALEDLNSGFKNSRVKVEKQVYQKFEKMLIDKLNYMVDKKSNPCATGGALKGYQITNKFESFKSMSTQNGFIFYIPAWLTSKIDPSTGFVNLLKTKYTSIADSKKFISSFDRIMYVPEEDLFEFALDYKNFSRTDADYIKKWKLYSYGNRIRIFRNPKKNNVFDWEEVCLTSAYKELFNKYGINYQQGDIRALLCEQSDKAFYSSFMALMSLMLQMRNSITGRTDVDFLISPVKNSDGIFYDSRNYEAQENAILPKNADANGAYNIARKVLWAIGQFKKAEDEKLDKVKIAISNKEWLEYAQTSVKH

SEQ ID NO: 51 - protein, 1307 aa, Acidaminococcus sp.
MTQFEGFTNLYQVSKTLRFELIPQGKTLKHIQEQGFIEEDKARNDHYKELKPIIDRIYKTYADQCLQLVQLDWENLSAAIDSYRKEKTEETRNALIEEQATYRNAIHDYFIGRTDNLTDAINKRHAEIYKGLFKAELFNGKVLKQLGTVTTTEHENALLRSFDKFTTYFSGFYENRKNVFSAEDISTAIPHRIVQDNFPKFKENCHIFTRLITAVPSLREHFENVKKAIGIFVSTSIEEVFSFPFYNQLLTQTQIDLYNQLLGGISREAGTEKIKGLNEVLNLAIQKNDETAHIIASLPHRFIPLFKQILSDRNTLSFILEEFKSDEEVIQSFCKYKTLLRNENVLETAEALFNELNSIDLTHIFISHKKLETISSALCDHWDTLRNALYERRISELTGKITKSAKEKVQRSLKHEDINLQEIISAAGKELSEAFKQKTSEILSHAHAALDQPLPTTLKKQEEKEILKSQLDSLLGLYHLLDWFAVDESNEVDPEFSARLTGIKLEMEPSLSFYNKARNYATKKPYSVEKFKLNFQMPTLASGWDVNKEKNNGAILFVKNGLYYLGIMPKQKGRYKALSFEPTEKTSEGFDKMYYDYFPDAAKMIPKCSTQLKAVTAHFQTHTTPILLSNNFIEPLEITKEIYDLNNPEKEPKKFQTAYAKKTGDQKGYREALCKWIDFTRDFLSKYTKTTSIDLSSLRPSSQYKDLGEYYAELNPLLYHISFQRIAEKEIMDAVETGKLYLFQIYNKDFAKGHHGKPNLHTLYWTGLFSPENLAKTSIKLNGQAELFYRPKSRMKRMAHRLGEKMLNKKLKDQKTPIPDTLYQELYDYVNHRLSHDLSDEARALLPNVITKEVSHEIIKDRRFTSDKFFFHVPITLNYQAANSPSKFNQRVNAYLKEHPETPIIGIDRGERNLIYITVIDSTGKILEQRSLNTIQQFDYQKKLDNREKERVAARQAWSVVGTIKDLKQGYLSQVIHEIVDLMIHYQAVVVLENLNFGFKSKRTGIAEKAVYQQFEKMLIDKLNCLVLKDYPAEKVGGVLNPYQLTDQFTSFAKMGTQSGFLFYVPAPYTSKIDPLTGFVDPFVWKTIKNHESRKHFLEGFDFLHYDVKTGDFILHFKMNRNLSFQRGLPGFMPAWDIVFEKNETQFDAKGTPFIAGKRIVPVIENHRFTGRYRDLYPANELIALLEEKGIVFRDGSNILPKLLENDDSHAIDTMVALIRSVLQMRNSNAATGEDYINSPVRDLNGVCFDSRFQNPEWPMDADANGAYHIALKGQLLLNHLKESKDLKLQNGISNQDWLAYIQELRN

SEQ ID NO: 52 - protein, 1241 aa, Butyrivibrio proteoclasticus
MLLYENYTKRNQITKSLRLELRPQGKTLRNIKELNLLEQDKAIYALLERLKPVIDEGIKDIARDTLKNCELSFEKLYEHFLSGDKKAYAKESERLKKEIVKTLIKNLPEGIGKISEINSAKYLNGVLYDFIDKTHKDSEEKQNILSDILETKGYLALFSKFLTSRITTLEQSMPKRVIENFEIYAANIPKMQDALERGAVSFAIEYESICSVDYYNQILSQEDIDSYNRLISGIMDEDGAKEKGINQTISEKNIKIKSEHLEEKPFRILKQLHKQILEEREKAFTIDHIDSDEEVVQVTKEAFEQTKEQWENIKKINGFYAKDPGDITLFIVVGPNQTHVLSQLIYGEHDRIRLLLEEYEKNTLEVLPRRTKSEDARYDKFVNAVPKKVAKESHTFDGLQKMTGDDRLFILYRDELARNYMRIKEAYGTFERDILKSRRGIKGNRDVQESLVSFYDELTKFRSALRIINSGNDEKADPIFYNTFDGIFEKANRTYKAENLCRNYVTKSPADDARIMASCLGTPARLRTHWWNGEENFAINDVAMIRRGDEYYYFVLTPDVKPVDLKTKDETDAQIFVQRKGAKSFLGLPKALFKCILEPYFESPEHKNDKNCVIEEYVSKPLTIDRRAYDIFKNGTFKKTNIGIDGLTEEKFKDDCRYLIDVYKEFIAVYTRYSCFNMSGLKRADEYNDIGEFFSDVDTRLCTMEWIPVSFERINDMVDKKEGLLFLVRSMFLYNRPRKPYERTFIQLFSDSNMEHTSMLLNSRAMIQYRAASLPRRVTHKKGSILVALRDSNGEHIPMHIREAIYKMKNNFDISSEDFIMAKAYLAEHDVAIKKANEDIIRNRRYTEDKFFLSLSYTKNADISARTLDYINDKVEEDTQDSRMAVIVTRNLKDLTYVAVVDEKNNVLEEKSLNEIDGVNYRELLKERTKIKYHDKTRLWQYDVSSKGLKEAYVELAVTQISKLATKYNAVVVVESMSSTFKDKFSFLDEQIFKAFEARLCARMSDLSFNTIKEGEAGSISNPIQVSNNNGNSYQDGVIYFLNNAYTRTLCPDTGFVDVFDKTRLITMQSKRQFFAKMKDIRIDDGEMLFTFNLEEYPTKRLLDRKEWTVKIAGDGSYFDKDKGEYVYVNDIVREQIIPALLEDKAVFDGNMAEKFLDKTAISGKSVELIYKWFANALYGIITKKDGEKIYRSPITGTEIDVSKNTTYNFGKKFMFKQEYRGDGDFLDAFLNYMQAQDIAV

SEQ ID NO: 53 - protein, 1238 aa, Candidatus Methanoplasma termitum
MNNYDEFTKLYPIQKTIRFELKPQGRTMEHLETFNFFEEDRDRAEKYKILKEAIDEYHKKFIDEHLTNMSLDWNSLKQISEKYYKSREEKDKKVFLSEQKRMRQEIVSEFKKDDRFKDLFSKKLFSELLKEEIYKKGNHQEIDALKSFDKFSGYFIGLHENRKNMYSDGDEITAISNRIVNENFPKFLDNLQKYQEARKKYPEWIIKAESALVAHNIKMDIVFSLEYFNKVLNQEGIQRYNLALGGYVTKSGEKMMGLNDALNLAHQSEKSSKGRIHMTPLFKQILSEKESFSYIPDVFTEDSQLLPSIGGFFAQIENDKDGNIFDRALELISSYAEYDTERIYIRQADINRVSNVIFGEWGTLGGLMREYKADSINDINLERTCKKVDKWLDSKEFALSDVLEAIDRTGNNDAFNEYISKMRTAREKIDAARKEMKFISEKISGDEESIHIIKTLLDSVQQFLHFFNLFKARQDIPLDGAFYAEFDEVHSKLFAIVPLYNKVRNYLTKNNLNTKKIKLNFKNPTLANGWDQNKVYDYASLIFLRDGNYYLGIINPKRKKNIKFEQGSGNGPFYRKMVYKQIPGPNKNLRPVFLTSTKGKKEYKPSKEIIEGYEADKHIRGDKFDLDFCHKLIDFFKESIEKHKDWSKFNFYFSPTESYGDISEFYLDVEKQGYRMHFENISAETIDEYVEKGDLFLFQIYNKDFVKAATGKKDMHTIYWNAAFSPENLQDVVVKLNGEAELFYRDKSDIKEIVHREGEILVNRTYNGRTPVPDKIHKKLTDYHNGRTKDLGEAKEYLDKVRYFKAHYDITKDRRYLNDKIYFHVPLTLNFKANGKKNLNKMVIEKFLSDEKAHIIGIDRGERNLLYYSIIDRSGKIIDQQSLNVIDGFDYREKLNQREIEMKDARQSWNAIGKIKDLKEGYLSKAVHEITKMAIQYNAIVVMEELNYGFKRGRFKVEKQIYQKFENMLIDKMNYLVFKDAPDESPGGVLNAYQLTNPLESFAKLGKQTGILFYVPAAYTSKIDPTTGFVNLFNTSSKTNAQERKEFLQKFESISYSAKDGGIFAFAFDYRKFGTSKTDHKNVWTAYTNGERMRYIKEKKRNELFDPSKEIKEALTSSGIKYDGGQNILPDILRSNNNGLIYTMYSSFIAAIQMRVYDGKEDYIISPIKNSKGEFFRTDPKRRELPIDADANGAYNIALRGELTMRAIAEKFDPDSEKMAKLELKHKDWFEFMQTRGD

SEQ ID NO: 54 - protein, 1281 aa, Eubacterium eligens
MNGNRSIVYREFVGVIPVAKTLRNELRPVGHTQEHIIQNGLIQEDELRQEKSTELKNIMDDYYREYIDKSLSGVTDLDFTLLFELMNLVQSSPSKDNKKALEKEQSKMREQICTHLQSDSNYKNIFNAKLLKEILPDFIKNYNQYDVKDKAGKLETLALFNGFSTYFTDFFEKRKNVFTKEAVSTSIAYRIVHENSLIFLANMTSYKKISEKALDEIEVIEKNNQDKMGDWELNQIFNPDFYNMVLIQSGIDFYNEICGVVNAHMNLYCQQTKNNYNLFKMRKLHKQILAYTSTSFEVPKMFEDDMSVYNAVNAFIDETEKGNIIGKLKDIVNKYDELDEKRIYISKDFYETLSCFMSGNWNLITGCVENFYDENIHAKGKSKEEKVKKAVKEDKYKSINDVNDLVEKYIDEKERNEFKNSNAKQYIREISNIITDTETAHLEYDDHISLIESEEKADEMKKRLDMYMNMYHWAKAFIVDEVLDRDEMFYSDIDDIYNILENIVPLYNRVRNYVTQKPYNSKKIKLNFQSPTLANGWSQSKEFDNNAIILIRDNKYYLAIFNAKNKPDKKIIQGNSDKKNDNDYKKMVYNLLPGANKMLPKVFLSKKGIETFKPSDYIISGYNAHKHIKTSENFDISFCRDLIDYFKNSIEKHAEWRKYEFKFSATDSYSDISEFYREVEMQGYRIDWTYISEADINKLDEEGKIYLFQIYNKDFAENSTGKENLHTMYFKNIFSEENLDKIIKLNGQAELFYRRASVKNPVKHKKDSVLVNKTYKNQLDNGDVVRIPIPDDIYNEIYKMYNGYIKESDLSEAAKEYLDKVEVRTAQKDIVKDYRYTVDKYFIHTPITINYKVTARNNVNDMVVKYIAQNDDIHVIGIDRGERNLIYISVIDSHGNIVKQKSYNILNNYDYKKKLVEKEKTREYARKNWKSIGNIKELKEGYISGVVHEIAMLIVEYNAIIAMEDLNYGFKRGRFKVERQVYQKFESMLINKLNYFASKEKSVDEPGGLLKGYQLTYVPDNIKNLGKQCGVIFYVPAAFTSKIDPSTGFISAFNFKSISTNASRKQFFMQFDEIRYCAEKDMFSFGFDYNNFDTYNITMGKTQWTVYTNGERLQSEFNNARRTGKTKSINLTETIKLLLEDNEINYADGHDIRIDMEKMDEDKKSEFFAQLLSLYKLTVQMRNSYTEAEEQENGISYDKIISPVINDEGEFFDSDNYKESDDKECKMPKDADANGAYCIALKGLYEVLKIKSEWTEDGFDRNCLKLPHAEWLDFIQNKRYE

SEQ ID NO: 55 - protein, 1300 aa, Francisella novicida
MSIYQEFVNKYSLSKTLRFELIPQGKTLENIKARGLILDDEKRAKDYKKAKQIIDKYHQFFIEEILSSVCISEDLLQNYSDVYFKLKKSDDDNLQKDFKSAKDTIKKQISEYIKDSEKFKNLFNQNLIDAKKGQESDLILWLKQSKDNGIELFKANSDITDIDEALEIIKSFKGWTTYFKGFHENRKVNYSSNDIPTSIIYRIVDDNLPKFLENKAKYESLKDKAPEAINYEQIKKDLAEELTFDIDYKTSEVNQRVFSLDEVFEIANFNNYLNQSGITKFNTIIGGKFVNGENTKRKGINEYINLYSQQINDKTLKKYKMSVLFKQILSDTESKSFVIDKLEDDSDVVTTMQSFYEQIAAFKTVEEKSIKETLSLLFDDLKAQKLDLSKIYFKNDKSLTDLSQQVFDDYSVIGTAVLEYITQQIAPKNLDNPSKKEQELIAKKTEKAKYLSLETIKLALEEFNKHRDIDKQCRFEEILANFAAIPMIFDEIAQNKDNLAQISIKYQNQGKKDLLQASAEDDVKAIKDLLDQTNNLLHKLKIFHISQSEDKANILDKDEHFYLVFEECYFELANIVPLYNKIRNYITQKPYSDEKFKLNFENSTLANGWDKNKEPDNTAILFIKDDKYYLGVMNKKNNKIFDDKAIKENKGEGYKKIVYKLLPGANKMLPKVFFSAKSIKFYNPSEDILRIRNHSTHTKNGSPQKGYEKFEFNIEDCRKFIDFYKQSISKHPEWKDFGFRFSDTQRYNSIDEFYREVENQGYKLTFENISESYIDSVVNQGKLYLFQIYNKDFSAYSKGRPNLHTLYWKALFDERNLQDVVYKLNGEAELFYRKQSIPKKITHPAKEAIANKNKDNPKKESVFEYDLIKDKRFTEDKFFFHCPITINFKSSGANKFNDEINLLLKEKANDVHILSIDRGERHLAYYTLVDGKGNIIKQDTFNIIGNDRMKTNYHDKLAAIEKDRDSARKDWKKINNIKEMKEGYLSQVVHEIAKLVIEYNAIVVFEDLNFGFKRGRFKVEKQVYQKLEKMLIEKLNYLVFKDNEFDKTGGVLRAYQLTAPFETFKKMGKQTGIIYYVPAGFTSKICPVTGFVNQLYPKYESVSKSQEFFSKFDKICYNLDKGYFEFSFDYKNFGDKAAKGKWTIASFGSRLINFRNSDKNHNWDTREVYPTKELEKLLKDYSIEYGHGECIKAAICGESDKKFFAKLTSVLNTILQMRNSKTGTELDYLISPVADVNGNFFDSRQAPKNMPQDADANGAYHIGLKGLMLLGRIKNNQEGKKLNLVIKNEEYFEFVQNRNN

SEQ ID NO: 56 - protein, 1206 aa, Unknown
  Lachnospiraceae bacterium
MYYESLTKQYPVSKTIRNELIPIGKTLDNIRQNNILESDVKRKQNYEHVKGILDEYHKQLINEALDNCTLPSLKIAAEIYLKNQKEVSDREDFNKTQDLLRKEVVEKLKAHENFTKIGKKDILDLLEKLPSISEDDYNALESFRNFYTYFTSYNKVRENLYSDKEKSSTVAYRLINENFPKFLDNVKSYRFVKTAGILADGLGEEEQDSLFIVETFNKTLTQDGIDTYNSQVGKINSSINLYNQKNQKANGFRKIPKMKMLYKQILSDREESFIDEFQSDEVLIDNVESYGSVLIESLKSSKVSAFFDALRESKGKNVYVKNDLAKTAMSVIVFENWRTFDDLLNQEYDLANENKKKDDKYFEKRQKELKKNKSYSLEHLCNLSEDSCNLIENYIHQISDDIENIIINNETFLRIVINEHDRSRKLAKNRKAVKAIKDFLDSIKVLERELKLINSSGQELEKDLIVYSAHEELLVELKQVDSLYNMTRNYLTKKPFSTEKVKLNFNRSTLLNGWDRNKETDNLGVLLLKDGKYYLGIMNTSANKAFVNPPVAKTEKVFKKVDYKLLPVPNQMLPKVFFAKSNIDFYNPSSEIYSNYKKGTHKKGNMFSLEDCHNLIDFFKESISKHEDWSKFGFKFDTQASYNDISEFYREVEKQGYKLTYTDIDETYINDLIERNELYLFQIYNKDFSMYSKGKLNLHTLYFMMLFDQRNIDDVVYKLNGEAEVFYRPASISEDELIIHKAGEEIKNKNPNRARTKETSTFSYDIVKDKRYSKDKFTLHIPITMNFGVDEVKRFNDAVNSAIRIDENVNVIGIDRGERNLLYVVVIDSKGNILEQISLNSIINKEYDIETDYHALLDEREGGRDKARKDWNTVENIRDLKAGLYLQVVNVVAKLVLKYNAIICLEDLNFGFKRGRQKVEKQVYQKFEKMLIDKLNYLVIDKSREQTSPKELGGALNALQLTSKFKSFKELGKQSGVIYYVPAYLTSKIDPTTGFANLFYMKCENVEKSKRFFDGFDFIRFNALENVFEFGFDYRSFTQRACGINSKWTVCTNGERIIKYRNPDKNNMFDEKVVVVTDEMKNLFEQYKIPYEDGRNVKDMIISNEEAEFYRRLYRLLQQTLQMRNSTSDGTRDYIISPVKNKREAYFNSELSDGSVPKDADANGAYNIARKGLWVLEQIRQKSEGEKINLAMTNAEWLEYAQTHLL

SEQ ID NO: 57 - protein, 1233 aa, Unknown
  Lachnospiraceae bacterium
MDYGNGQFERRAPLTKTITLRLKPIGETRETIREQKLLEQDAAFRKLVETVTPIVDDCIRKIADNALCHFGTEYDFSCLGNAISKNDSKAIKKETEKVEKLLAKVLTENLPDGLRKVNDINSAAFIQDTLTSFVQDDADKRVLIQELKGKTVLMQRFLTTRITALTVWLPDRVFENFNIFIENAEKMRILLDSPLNEKIMKFDPDAEQYASLEFYGQCLSQKDIDSYNLIISGIYADDEVKNPGINEIVKEYNQQIRGDKDESPLPKLKKLHKQILMPVEKAFFVRVLSNDSDARSILEKILKDTEMLPSKIIEAMKEADAGDIAVYGSRLHELSHVIYGDHGKLSQIIYDKESKRISELMETLSPKERKESKKRLEGLEEHIRKSTYTFDELNRYAEKNVMAAYIAAVEESCAEIMRKEKDLRTLLSKEDVKIRGNRHNTLIVKNYFNAWTVFRNLIRILRRKSEAEIDSDFYDVLDDSVEVLSLTYKGENLCRSYITKKIGSDLKPEIATYGSALRPNSRWWSPGEKFNVKFHTIVRRDGRLYYFILPKGAKPVELEDMDGDIECLQMRKIPNPTIFLPKLVFKDPEAFFRDNPEADEFVFLSGMKAPVTITRETYEAYRYKLYTVGKLRDGEVSEEEYKRALLQVLTAYKEFLENRMIYADLNFGFKDLEEYKDSSEFIKQVETHNTFMCWAKVSSSQLDDLVKSGNGLLFEIWSERLESYYKYGNEKVLRGYEGVLLSILKDENLVSMRTLLNSRPMLVYRPKESSKPMVVHRDGSRVVDRFDKDGKYIPPEVHDELYRFFNNLLIKEKLGEKARKILDNKKVKVKVLESERVKWSKFYDEQFAVTFSVKKNADCLDTTKDLNAEVMEQYSESNRLILIRNTTDILYYLVLDKNGKVLKQRSLNIINDGARDVDWKERFRQVTKDRNEGYNEWDYSRTSNDLKEVYLNYALKEIAEAVIEYNAILIIEKMSNAFKDKYSFLDDVTFKGFETKKLAKLSDLHFRGIKDGEPCSFTNPLQLCQNDSNKILQDGVIFMVPNSMTRSLDPDTGFIFAINDHNIRTKKAKLNFLSKFDQLKVSSEGCLIMKYSGDSLPTHNTDNRVWNCCCNHPITNYDRETKKVEFIEEPVEELSRVLEENGIETDTELNKLNERENVPGKVVDAIYSLVLNYLRGTVSGVAGQRAVYYSPVTGKKYDISFIQAMNLNRKCDYYRIGSKERGEWTDFVAQLIN

SEQ ID NO: 58 - protein, 1227 aa, Unknown
  Lachnospiraceae bacterium
MSKLEKFTNCYSLSKTLRFKAIPVGKTQENIDNKRLLVEDEKRAEDYKGVKKLLDRYYLSFINDVLHSIKLKNLNNYISLFRKKTRTEKENKELENLEINLRKEIAKAFKGNEGYKSLFKKDIIETILPEFLDDKDEIALVNSFNGFTTAFTGFFDNRENMFSEEAKSTSIAFRCINENLTRYISNMDIFEKVDAIFDKHEVQEIKEKILNSDYDVEDFFEGEFFNFVLTQEGIDVYNAIIGGFVTESGEKIKGLNEYINLYNQKTKQKLPKFKPLYKQVLSDRESLSFYGEGYTSDEEVLEVFRNTLNKNSEIFSSIKKLEKLFKNFDEYSSAGIFVKNGPAISTISKDIFGEWNVIRDKWNAEYDDIHLKKKAVVTEKYEDDRRKSFKKIGSFSLEQLQEYADADLSVVEKLKEIIIQKVDEIYKVYGSSEKLFDADFVLEKSLKKNDAVVAIMKDLLDSVKSFENYIKAFFGEGKETNRDESFYGDFVLAYDILLKVDHIYDAIRNYVTQKPYSKDKFKLYFQNPQFMGGWDKDKETDYRATILRYGSKYYLAIMDKKYAKCLQKIDKDDVNGNYEKINYKLLPGPNKMLPKVFFSKKWMAYYNPSEDIQKIYKNGTFKKGDMFNLNDCHKLIDFFKDSISRYPKWSNAYDFNFSETEKYKDIAGFYREVEEQGYKVSFESASKKEVDKLVEEGKLYMFQIYNKDFSDKSHGTPNLHTMYFKLLFDENNHGQIRLSGGAELFMRRASLKKEELVVHPANSPIANKNPDNPKKTTTLSYDVYKDKRFSEDQYELHIPIANINKCPKNIFKINTEVRVLLKHDDNPYVIGIDRGERNLLYIVVVDGKGNIVEQYSLNEIINNFNGIRIKTDYHSLLDKKEKERFEARQNWTSIENIKELKAGYISQVVHKICELVEKYDAVIALEDLNSGFKNSRVKVEKQVYQKFEKMLIDKLNYMVDKKSNPCATGGALKGYQITNKFESFKSMSTQNGFIFYIPAWLTSKIDPSTGFVNLLKTKYTSIADKKFISSFDRIMYVPEEDLFEFALDYKNFSRTDADYIKKWKLYSYGNRIRIFRNPKKNNVFDWEEVCLTSAYKELFNKYGINYQQGDIRALLCEQSDKAFYSSFMALMSLMLQMRNSITGRTDVDFLISPVKNSDGIFYDSRNYEAQENAILPKNADANGAYNIARKVLWAIGQFKKAEDEKLDKVKIASNKEWLEYAQTSVKH

SEQ ID NO: 59 - protein, 1264 aa, Leptospira inadai
MEDYSGFVNIYSIQKTLRFELKPVGKTLEHIEKKGFLKKDKIRAEDYKAVKKIIDKYHRAYIEEVFDSVLHQKKKKDKTRFSTQFIKEIKEFSELYYKTEKNIPDKERLEALSEKLRKMLVGAFKGEFSEEVAEKYNKNLFSKELIRNEIEKFCETDEERKQVSNFKSFTTYFTGFHSNRQNIYSDEKKSTAIGYRIIHQNLPKFLDNLKIIESIQRRFKDFPWSDLKKNLKKIDKNIKLTEYFSIDGFVNVLNQKGIDAYNTILGGKSEESGEKIQGLNEYINLYRQKNNIDRKNPLNVKILFKQILGDRETKSFIPEAFPDDQSVLNSITEFAKYLKLDKKKKSIIAELKKFLSSFNRYELDGIYLANDNSLASISTFLFDDWSFIKKSVSFKYDESVGDPKKKIKSPLKYEKEKEKWLKQKYYTISFLNDAIESYSKSQDEKRVKIRLEAYFAEFKSKDDAKKQFDLLERIEEAYAIVEPLLGAEYPRDRNLKADKKEVGKIKDFLDSIKSLQFFLKPLLSAEIFDEKDLGFYNQLEGYYEEIDISGHLYNKVRNYLTGKIYSKEKFKLNFENSTLLKGWDENREVANLCVIFREDQKYYLGVMDKENNTILSDIPKVKPNELFYEKMVYKLIPTPHMQLPRIIFSSDNLSIYNPSKSILKIREAKSFKEGKNFKLKDCHKFIDFYKESISKNEDWSRFDFKFSKTSSYENISEFYREVERQGYNLDFKKVSKFYIDSLVEDGKLYLFQIYNKDFSIFSKGKPNLHTIYFRSLFSKENLKDVCLKLNGEAEMFFRKKSINYDEKKKREGHHPELFEKLKYPILKDKRYSEDKFQFHLPISLNFKSKERLNFNLKVNEFLKRNKDINIIGIDRGERNLLYLVMINQKGEILKQTLLDSMQSGKGRPEINYKEKLQEKEIERDKARKSWGTVENIKELKEGYLSIVIHQISKLMVENNAIVVLEDLNIGFKRGRQKVERQVYQKFEKMLIDKLNFLVFKENKPTEPGGVLKAYQLTDEFQSFEKLSKQTGFLFYVPSWNTSKIDPRTGFIDFLHPAYENIEKAKQWINKFDSIRFNSKMDWFEFTADTRKFSENLMLGKNRVWVICTTNVERYFTSKTANSSIQYNSIQITEKLKELFVDIPFSNGQDLKPEILRKNDAVFFKSLLFYIKTTLSLRQNNGKKGEEEKDFILSPVVDSKGRFFNSLEASDDEPKDADANGAYHIALKGLMNLLVLNETKEENLSRPKWKIKNKDWLEFVWERNR

SEQ ID NO: 60 - protein, 1373 aa, Moraxella bovoculi
MLFQDFTHLYPLSKTVRFELFIDRTLEHIHAKNFLSQDETMADMHQKVKVILDDYHRDFIADMMGEVKLTKLAEFYDVYLKFRKNPKDDELQKAQLKDLQAVLRKEIVKPIGNGGKYKAGYDRLFGAKLFKDGKELGDLAKFVIAQEGESSPKLAHLAHFEKFSTYFTGFHDNRKNMYSDEDKHTAIAYRLIHENLPRFIDNLQILTTIKQKHSALYDQIINELTASGLDVSLASHLDGYHKLLTQEGITAYNTLLGGISGEAGSPKIQGINELINSHHNQHCHKSERIAKLRPLHKQILSDGMSVSFLPSKFADDSEMCQAVNEFYRHYADVFAKVQSLFDGFDDHQKDGIYVEHKNLNELSKQAFGDFALLGRVLDGYYVDVVNPEFNERFAKAKTDNAKAKLTKEKDKFIKGVHSLASLEQAIEHYTARHDDESVQAGKLGQYFKHGLAGVDNPIQKIHNNHSTIKGFLERERPAGERALPKIKSGKNPEMTQLRQLKELLDNALNVAHFAKLLTTKTTLDNQDGNFYGEFGVLYDELAKIPTLYNKVRDYLSQKPFSTEKYKLNFGNPTLLNGWDLNKEKDNFGVILQKDGCYYLALLDKAHKKVFDNAPNTGKSIYQKMIYKYLEVRKQFPKVFFSKEAIAINYHPSKELVEIKDKGRQRSDDERLKLYRFILECLKIHPKYDKKFEGAIGDIQLFKKDKKGREVPISEKDLFKDINGIFSSKPKLEMEDFFIGEFKRYNPSQDLVDQYNIYKKIDSNDNRKKENFYNNHPKFKKDLVRYYYESMCKHEEWEESFEFSKKLQDIGCYVDVNELFTEIETRRLNYKISFCNINADYIDELVEQGQLYLFQIYNKDFSPKAHGKPNLHTLYFKALFSEDNLADPIYKLNGEAQIFYRKASLDMNETTIHRAGEVLENKNPDNPKKRQFVYDIIKDKRYTQKDFMLHVPITMNFGVQGMTIKEFNKKVNQSIQQYDEVNVIGIDRGERHLLYLTVINSKGEILEQCSLNDITTASANGTQMTTPYHKILDKREIERLNARVGWGEIETIKELKSGYLSHVVHQISQLMLKYNAIVVLEDLNFGFKRGRFKVEKQIYQNFENALIKKLNHLVLKDKADDEIGSYKNALQLTNNFTDLKSIGKQTGFLFYVPAWNTSKIDPETGFVDLLKPRYENIQASQAFFGKFDKICYNADKDYFEFHIDYAKFTDKAKNSRQIWTICSHGDKRYVYDKTANQNKGAAKGINVNDILKSLFARHHINEKQPNLVMDICQNNDKEFHKSLMYLLKTLLALRYSNASSDEDFILSPVANDEGVFFNSALADDTQPQNADANGAYHIALKGLWLLNELKNSDDLNKVKLAIDNQTWLNFAQNR

SEQ ID NO: 61 - protein, 1352 aa, Unknown
  Parcubacteria bacterium
MENIFDQFIGKYSLSKTLRFELKPVGKTEDFLKINKVFEKDQTIDDSYNQAKFYFDSLHQKFIDAALASDKTSELSFQNFADVLEKQNKIILDKKREMGALRKRDKNAVGIDRLQKEINDAEDIIQKEKEKIYKDVRTLFDNEAESWKTYYQEREVDGKKITESKADLKQKGADFLTAAGILKVLKYEFPEEKEKEFQAKNQPSLFVEEKENPGQKRYIFDSFDKFAGYLTKFQQTKKNLYAADGTSTAVATRIADNFIIFHQNTKVFRDKYKNNHTDLGFDEENIFEIERYKNCLLQREIEHIKNENSYNKIIGRINKKIKEYRDQKAKDTKLTKSDFPFFKNLDKQILGEVEKEKQLIEKTREKTEEDVLIERFKEFIENNEERFTAAKKLMNAFCNGEFESEYEGIYLKNKAINTISRRWFVSDRDFELKLPQQKSKNKSEKNEPKVKKFISIAEIKNAVEELDGDIFKAVFYDKKIIAQGGSKLEQFLVIWKYEFEYLFRDIERENGEKLLGYDSCLKIAKQLGIFPQEKEAREKATAVIKNYADAGLGIFQMMKYFSLDDKDRKNTPGQLSTNFYAEYDGYYKDFEFIKYYNEFRNFITKKPFDEDKIKLNFENGALLKGWDENKEYDFMGVILKKEGRLYLGIMHKNHRKLFQSMGNAKGDNANRYQKMIYKQIADASKDVPRLLLTSKKAMEKFKPSQEILRIKKEKTFKRESKNFSLRDLHALIEYYRNCIPQYSNWSFYDFQFQDTGKYQNIKEFTDDVQKYGYKISFRDIDDEYINQALNEGKMYLFEVVNKDIYNTKNGSKNLHTLYFEHILSAENLNDPVFKLSGMAEIFQRQPSVNEREKITTQKNQCILDKGDRAYKYRRYTEKKIMFHMSLVLNTGKGEIKQVQFNKIINQRISSSDNEMRVNVIGIDRGEKNLLYYSVVKQNGEIIEQASLNEINGVNYRDKLIEREKERLKNRQSWKPVVKIKDLKKGYISHVIHKICQLIEKYSAIVVLEDLNMRFKQIRGGIERSVYQQFEKALIDKLGYLVFKDNRDLRAPGGVLNGYQLSAPFVSFEKMRKQTGILFYTQAEYTSKTDPITGFRKNVYISNSASLDKIKEAVKKFDAIGWDGKEQSYFFKYNPYNLADEKYKNSTVSKEWAIFASAPRIRRQKGEDGYWKYDRVKVNEEFEKLLKVWNFVNPKATDIKQEIIKKIKAGDLQGEKELDGRLRNFWHSFIYLFNLVLELRNSFSLQIKIKAGEVIAVDEGVDFIASPVKPFFTTPNPYIPSNLCWLAVENADANGAYNIARKGVMILKKIREHAKKDPEFKKLPNLFISNAEWDEAARDWGKYAGTTALNLDH

SEQ ID NO: 62 - protein, 1260 aa, Porphyromonas crevioricanis
MDSLKDFTNLYPVSKTLRFELKPVGKTLENIEKAGILKEDEHRAESYRRVKKIIDTYHKVFIDSSLENMAKMGIENEIKAMLQSFCELYKKDHRTEGEDKALDKIRAVLRGLIVGAFTGVCGRRENTVQNEKYESLFKEKLIKEILPDFVLSTEAESLPFSVEEATRSLKEFDSFTSYFAGFYENRKNIYSTKPQSTAIAYRLIHENLPKFIDNILVFQKIKEPIAKELEHIRADFSAGGYIKKDERLEDIFSLNYYIHVLSQAGIEKYNALIGKIVTEGDGEMKGLNEHINLYNQQRGREDRLPLFRPLYKQILSDREQLSYLPESFEKDEELLRALKEFYDHIAEDILGRTQQLMTSISEYDLSRIYVRNDSQLTDISKKMLGDWNAIYMARERAYDHEQAPKRITAKYERDRIKALKGEESISLANLNSCIAFLDNVRDCRVDTYLSTLGQKEGPHGLSNLVENVFASYHEAEQLLSFPYPEENNLIQDKDNVVLIKNLLDNISDLQRFLKPLWGMGDEPDKDERFYGEYNYIRGALDQVIPLYNKVRNYLTRKPYSTRKVKLNFGNSQLLSGWDRNKEKDNSCVILRKGQNFYLAIMNNRHKRSFENKMLPEYKEGEPYFEKMDYKFLPDPNKMLPKVFLSKKGIEIYKPSPKLLEQYGHGTHKKGDTFSMDDLHELIDFFKHSIEAHEDWKQFGFKFSDTATYENVSSFYREVEDQGYKLSFRKVSESYVYSLIDQGKLYLFQIYNKDFSPCSKGTPNLHTLYWRMLFDERNLADVIYKLDGKAEIFFREKSLKNDHPTHPAGKPIKKKSRQKKGEESLFEYDLVKDRRYTMDKFQFHVPITMNFKCSAGSKVNDMVNAHIREAKDMHVIGIDRGERNLLYICVIDSRGTILDQISLNTINDIDYHDLLESRDKDRQQEHRNWQTIEGIKELKQGYLSQAVHRIAELMVAYKAVVALEDLNMGFKRGRQKVESSVYQQFEKQLIDKLNYLVDKKKRPEDIGGLLRAYQFTAPFKSFKEMGKQNGFLFYIPAWNTSNIDPTTGFVNLFHVQYENVDKAKSFFQKFDSISYNPKKDWFEFAFDYKNFTKKAEGSRSMWILCTHGSRIKNFRNSQKNGQWDSEEFALTEAFKSLFVRYEIDYTADLKTAIVDEKQKDFFVDLLKLFKLTVQMRNSWKEKDLDYLISPVAGADGRFFDTREGNKSLPKDADANGAYNIALKGLWALRQIRQTSEGGKLKLAISNKEWLQFVQERSYEKD

SEQ ID NO: 63 - protein, 1324 aa, Prevotella disiens
MENYQEFTNLFQLNKTLRFELKPIGKTCELLEEGKIFASGSFLEKDKVRADNVSYVKKEIDKKHKIFIEETLSSFSISNDLLKQYFDCYNELKAFKKDCKSDEEEVKKTALRNKCTSIQRAMREAISQAFLKSPQKKLLAIKNLIENVFKADENVQHFSEFTSYFSGFETNRENFYSDEEKSTSIAYRLVHDNLPIFIKNIYIFEKLKEQFDAKTLSEIFENYKLYVAGSSLDEVFSLEYFNNTLTQKGIDNYNAVIGKIVKEDKQEIQGLNEHINLYNQKHKDRRLPFFISLKKQILSDREALSWLPDMFKNDSEVIDALKGFYIEDGFENNVLTPLATLLSSLDKYNLNGIFIRNNEALSSLSQNVYRNFSIDEAIDAQNAELQTFNNYELIANALRAKIKKETKQGRKSFEKYEEYIDKKVKAIDSLSIQEINELVENYVSEFNSNSGNMPRKVEDYFSLMRKGDFGSNDLIENIKTKLSAAEKLLGTKYQETAKDIFKKDENSKLIKELLDATKQFQHFIKPLLGTGEEADRDLVFYGDFLPLYEKFEELTLLYNKVRNRLTQKPYSKDKIRLCFNKPKLMTGWVDSKTEKSDNGTQYGGYLFRKKNEIGEYDYFLGISSKAQLFRKNEAVIGDYERLDYYQPKANTIYGSAYEGENSYKEDKKRLNKVIIAYIEQIKQTNIKKSIIESISKYPNISDDDKVTPSSLLEKIKKVSIDSYNGILSFKSFQSVNKEVIDNLLKTISPLKNKAEFLDLINKDYQIFTEVQAVIDEICKQKTFIYFPISNVELEKEMGDKDKPLCLFQISNKDLSFAKTFSANLRKKRGAENLHTMLFKALMEGNQDNLDLGSGAIFYRAKSLDGNKPTHPANEAIKCRNVANKDKVSLFTYDIYKNRRYMENKFLFHLSIVQNYKAANDSAQLNSSATEYIRKADDLHIIGIDRGERNLLYYSVIDMKGNIVEQDSLNIIRNNDLETDYHDLLDKREKERKANRQNWEAVEGIKDLKKGYLSQAVHQIAQLMLKYNAIIALEDLGQMFVTRGQKIEKAVYQQFEKSLVDKLSYLVDKKRPYNELGGILKAYQLASSITKNNSDKQNGFLFYVPAWNTSKIDPVTGFTDLLRPKAMTIKEAQDFFGAFDNISYNDKGYFEFETNYDKFKIRMKSAQTRWTICTFGNRIKRKKDKNYWNYEEVELTEEFKKLFKDSNIDYENCNLKEEIQNKDNRKFFDDLIKLLQLTLQMRNSDDKGNDYIISPVANAEGQFFDSRNGDKKLPLDADANGAYNIARKGLWNIRQIKQTKNKDDLNLSISSTEWLDFVREKPYLK

SEQ ID NO: 64 - protein, 1484 aa, Unknown
  Peregrinibacteria bacterium
  misc_feature (1073)..(1073): Xaa can be any naturally occurring amino acid
MSNFFKNFTNLYELSKTLRFELKPVGDTLTNMKDHLEYDEKLQTFLKDQNIDDAYQALKPQFDEIHEEFITDSLESKKAKEIDFSEYLDLFQEKKELNDSEKKLRNKIGETFNKAGEKWKKEKYPQYEWKKGSKIANGADILSCQDMLQFIKYKNPEDEKIKNYIDDTLKGFFTYFGGFNQNRANYYETKKEASTAVATRIVHENLPKFCDNVIQFKHIIKRKKDGTVEKTERKTEYLNAYQYLKNNNKITQIKDAETEKMIESTPIAEKIFDVYYFSSCLSQKQIEEYNRIIGHYNLLINLYNQAKRSEGKHLSANEKKYKDLPKFKTLYKQIGCGKKKDLFYTIKCDTEEEANKSRNEGKESHSVEEIINKAQEAINKYFKSNNDCENINTVPDFINYILTKENYEGVYWSKAAMNTISDKYFANYHDLQDRLKEAKVFQKADKKSEDDIKIPEAIELSGLFGVLDSLADWQTTLFKSSILSNEKLKIITDSQTPSEALLKMIFNDIEKNMESFLKETNDIITLKKYKGNKEGTEKIKQWFDYTLAINRMLKYFLVKENKIKGNSLDTNISEALKTLIYSDDAEWFKWYDALRNYLTQKPQDEAKENKLKLNFDNPSLAGGWDVNKECSNFCVILKDKNEKKYLAMIKKGENTLFQKEWTEGRGKNLTKKSNPLFEINNCEILSKMEYDFWADVSKMIPKCSTQLKAVVNHFKQSDNEFIFPIGYKVTSGEKFREECKISKQDFELNNKVFNKNELSVTAMRYDLSSTQEKQYIKAFQKEYWELLFKQEKRDTKLTNNEIFNEWINFCNKKYSELLSWERKYKDALTNWINFCKYFLSKYPKTTLFNYSFKESENYNSLDEFYRDVDICSYKLNINTTINKSILDRLVEEGKLYLFEIKNQDSNDGKSIGHKNNLHTIYWNAIFENFDNRPKLNGEAEIFYRKAISKDKLGIVKGKKTKNGTWIIKNYRFSKEKFILHVPITLNFCSNNEYVNDIVNTKFYNFSNLHFLGIDRGEKHLAYYSLVNKNGEIVDQGTLNLPFTDKDGNQRSIKKEKYFYNKQEDKWEAKEVDXWNYNDLLDAMASNRDMARKNWQRIGTIKEAKNGYVSLVIRKIADLAVNNERPAFIVLEDLNTGFKRSRQKIDKSVYQKFELALAKKLNFLVDKNAKRDEIGSPTKALQLTPPVNNYGDIENKKQAGIMLYTRANYTSQTDPATGWRKTIYLKAGPEETTYKKDGKIKNKSVKDQIIETFTDIGFDGKDYYFEYDKGEFVDEKTGEIKPKKWRLYSGENGKSLDRFRGEREKDKYEWKIDKIDIVKILDDLFVNFDKNISLLKQLKEGVELTRNNEHGTGESLRFAINLIQQIRNTGNNERDNDFILSPVRDENGKHFDSREYWDKETKGEKISMPSSGDANGAFNIARKGIIMNAHILANSDSKDLSLFVSDEEWDLHLNNKTEWKKQLNIFSSRKAMAKRKKKRPAATKK

SEQ ID NO: 65 - protein, 1245 aa, Porphyromonas macacae
MKTQHFFEDFTSLYSLSKTIRFELKPIGKTLENIKKNGLIRRDEQRLDDYEKLKKVIDEYHEDFIANILSSFSFSEEILQSYIQNLSISEARAKIEKTMRDTLAKAFSEDERYKSIFKKELVKKDIPVWCPAYKSLCKKFDNFTTSLVPFHENRKNLYTSNEITASIPYRIVHVNLPKFIQNIEALCELQKKMGADLYLEMMENLRNVWPSFVKTPDDLCNLKTYNHLMVQSSISEYNRFVGGYSTEDGTKHQGINEWINIYRQRNKEMRLPGLVFLHKQILAKVDSSSFISDTLENDDQVFCVLRQFRKLFWNTVSSKEDDAASLKDLFCGLSGYDPEAIYVSDAHLATISKNIFDRWNYISDAIRRKTEVLMPRKKESVERYAEKISKQIKKRQSYSLAELDDLLAHYSEESLPAGFSLLSYFTSLGGQKYLVSDGEVILYEEGSNIWDEVLIAFRDLQVILDKDFTEKKLGKDEEAVSVIKKALDSALRLRKFFDLLSGTGAEIRRDSSFYALYTDRMDKLKGLLKMYDKVRNYLTKKPYSIEKFKLHFDNPSLLSGWDKNKELNNLSVIFRQNGYYYLGIMTPKGKNLFKTLPKLGAEEMFYEKMEYKQIAEPMLMLPKVFFPKKTKPAFAPDQSVVDIYNKKTFKTGQKGFNKKDLYRLIDFYKEALTVHEWKLFNFSFSPTEQYRNIGEFFDEVREQAYKVSMVNVPASYIDEAVENGKLYLFQIYNKDFSPYSKGIPNLHTLYWKALFSEQNQSRVYKLCGGGELFYRKASLHMQDTTVHPKGISIHKKNLNKKGETSLFNYDLVKDKRFTEDKFFFHVPISINYKNKKITNVNQMVRDYIAQNDDLQHGIDRGERNLLYISRIDTRGNLLEQFSLNVIESDKGDLRTDYQKILGDREQERLRRRQEWKSIESIKDLKDGYMSQVVHKICNMVVEHKAIVVLENLNLSFMKGRKKVEKSVYEKFERMLVDKLNYLVVDKKNLSNEPGGLYAAYQLTNPLFSFEELHRYPQSGILFFVDPWNTSLTDPSTGFVNLLGRINYTNVGDARKFFDRFNAIRYDGKGNILFDLDLSRFDVRVETQRKLWTLTTFGSRIAKSKKSGKWMVERIENLSLCFLELFEQFNIGYRVEKDLKKAILSQDRKEFYVRLIYLFNLMMQIRNSDGEEDYILSPALNEKNLQFDSRLIEAKDLPVDADANGAYNVARKGLMVVQRIKRGDHESIHRIGRAQWLRYVQEGIVE

SEQ ID NO: 66 - protein, 1250 aa, Smithella sp.
MQTLFENFTNQYPVSKTLRFELIPQGKTKDFIEQKGLLKKDEDRAEKYKKVKNIIDEYHKDFIEKSLNGLKLDGLEKYKTLYLKQEKDDKDKKAFDKEKENLRKQIANAFRNNEKFKTLFAKELIKNDLMSFACEEDKKNVKEFEAFTTYFTGFHQNRANMYVADEKRTAIASRLIHENLPKFIDNIKIFEKMKKEAPELLSPFNQTLKDMKDVIKGTTLEEIFSLDYFNKTLTQSGIDIYNSVIGGRTPEEGKTKIKGLNEYINTDFNQKQTDKKKRQPKFKQLYKQILSDRQSLSFIAEAFKNDTEILEAIEKFYVNELLHFSNEGKSTNVLDAIKNAVSNLESFNLTKMYFRSGASLTDVSRKVFGEWSIINRALDNYYATTYPIKPREKSEKYEERKEKWLKQDFNVSLIQTAIDEYDNETVKGKNSGKVIADYFAKFCDDKETDLIQKVNEGYIAVKDLLNTPCPENEKLGSNKDQVKQIKAFMDSIMDIMHFVRPLSLKDTDKEKDETFYSLFTPLYDHLTQTIALYNKVRNYLTQKPYSTEKIKLNFENSTLLGGWDLNKETDNTAIILRKDNLYYLGIMDKRHNRIFRNVPKADKKDFCYEKMVYKLLPGANKMLPKVFFSQSRIQEFTPSAKLLENYANETHKKGDNFNLNHCHKLIDFFKDSINKHEDWKNFDFRFSATSTYADLSGFYHEVEHQGYKISFQSVADSFIDDLVNEGKLYLFQIYNKDFSPFSKGKPNLHTLYWKMLFDENNLKDVVYKLNGEAEVFYRKKSIAEKNTTIHKANESIINKNPDNPKATSTFNYDIVKDKRYTIDKFQFHIPITMNFKAEGIFNMNQRVNQFLKANPDINIIGIDRGERHLLYYALINQKGKILKQDTLNVIANEKQKVDYHNLLDKKEGDRATARQEWGVIETIKELKEGYLSQVIHKLTDLMIENNAIIVMEDLNFGFKRGRQKVEKQVYQKFEKMLIDKLNYLVDKNKKANELGGLLNAFQLANKFESFQKMGKQNGFIFYVPAWNTSKTDPATGFIDFLKPRYENLNQAKDFFEKFDSIRLNSKADYFEFAFDFKNFTEKADGGRTKWTVCTTNEDRYQWNRALNNNRGSQEKYDITAELKSLFDGKVDYKSGKDLKQQIASQESADFFKALMKNLSITLSLRHNNGEKGDNEQDYILSPVADSKGRFFDSRKADDDMPKNADANGAYHIALKGLWCLEQISKTDDLKKVKLAISNKEWLEFVQTLKG

SEQ ID NO: 67 - DNA, 3987 bp, Artificial sequence
  Synthetic polynucleotide
atggccgggagcaagaagcgccggataaagcaggacacgcagttcgagggcttcaccaacctgtaccaagtctccaagacgctccggttcgagcttatcccgcaagggaagaccctgaaacacatccaggaacaaggtttcatcgaggaggacaaggcccgcaacgaccactacaaggagctcaagcccataatcgatcggatctacaagacgtacgccgaccagtgcctccaactggtgcagctcgactgggagaacctgagcgccgccattgacagctaccgcaaggaaaagacggaggagacgcgcaacgcccttattgaggagcaagccacctaccgcaacgccatccacgactacttcatcgggcgcaccgacaacctgacggacgcgatcaacaagcgccacgcggaaatctacaagggccttttcaaggccgagctcttcaacgggaaggtcctaaaacagctcgggactgtcacgacaaccgagcatgagaacgccctccttcgcagcttcgacaagttcaccacatacttctcgggcttctaccggaaccgcaagaacgttttcagcgccgaggacatctccaccgccatcccgcacaggatcgtccaggacaacttccccaagttcaaggagaactgccacatcttcacgcgcctgattacagccgtaccttcacttcgtgagcacttcgagaacgtcaaaaaggccatcgggatcttcgtctccacgtccatcgaggaggtattctctttcccgttctataaccagctcctgacccagacgcagatcgacctctacaaccagctactgggcggcatcagccgggaggccgggaccgagaaaataaagggcctcaacgaagttctcaacctggccatccagaagaacgacgagaccgcgcatatcatcgcatccctgccgcatcgcttcattcctttgttcaagcagatattgagcgaccggaacaccctctcgttcatcctcgaagaattcaagagcgacgaggaggtcattcagtctttctgcaagtacaagacgctcctacggaatgagaatgtgctggagaccgcggaggcactcttcaatgagctgaactccattgacctgacccacatcttcattagccacaagaaactggagacgatctccagcgccctgtgcgaccactgggacactctccgcaacgccctctacgaacgccggatctccgaacttaccggcaagataactaagtcggctaaggagaaggtgcaacggagcctcaagcacgaggacatcaaccttcaggaaatcatctcagccgcgggcaaggagctgagcgaggcgtttaagcagaaaacatcggagatactgagccacgcgcacgcggccctggatcaaccgctgccgacgactctcaagaagcaagaggagaaggaaatccttaagtcccagctcgactcgctgctcggcctctatcacttgctcgactggttcgcggttgatgagtccaacgaggtggacccggagttctccgcgcgcctcacgggtattaagctggagatggagccaagcttaagcttctacaacaaggcccgcaactacgcgaccaaaaaaccgtactcagtcgagaaattcaagctgaatttccagatgcctacattggcgagggggtgggacgtgaaccgcgagaagaacaatggagccatcctgttcgtcaaaaatgggttgtactacctgggcatcatgcccaagcagaagggccgttacaaggccctgtcattcgagcctaccgagaagacctcggagggcttcgacaagatgtactacgactatttcccggacgccgccaagatgatcccgaagtgctccacgcagctcaaagccgtcacggcccacttccagacgcataccacgccgatacttctgagcaacaacttcattgagccgctagagatcacgaaggagatatacgacctaaacaaccccgaaaaggagcccaagaagttccagacagcctacgctaagaagacaggtgatcagaagggatatagggaggcactctgcaagtggatcgacttcacgcgcgacttcctgtcgaaatatacaaagacgaccagcattgacctaagttctctccgcccatcctcccagtacaaggatctgggcgagtattatgcggagctgaacccattgctgtaccacatcagcttccagaggatcgccgagaaggagattatggacgcggtggagacggggaaactatacctgttccaaatatataacaaggacttcgctaaagggcaccacgggaagcccaacctgcacacactctactggacgggcttgttttcgccagaaaatttggccaagacttcgatcaagctcaacggccaggcggagttgttttaccgtcccaagtctcgcatgaagcgcatggcgcatcgcctcggagagaaaatgcttaacaagaagctcaaggatcagaagacgcccatacctgatacgttgtaccaggaattgtacgactacgtgaaccaccgcctatcgcacgacctctcagacgaggcccgcgccctcctcccaaacgtgattactaaggaggtttcccatgaaataatcaaggaccgacggttcaccagcgacaaattttttttccacgtgcctatcacgctcaattaccaggcggccaactccccatcgaagttcaaccagcgcgtgaacgcctaccttaaggagcacccggagaccccaatcatcgggatcgaccgtggcgagcggaacctgatctatattacggtgatcgatagcaccgggaagatcctggagcagcgctccctgaacacaatccagcagtttgactaccagaagaaactcgacaaccgggagaaggagcgcgtcgcagcccggcaagcatggagtgtggtcggcaccataaaggacctgaaacagggttacctaagtcaagttatccacgagatcgttgacctgatgatacactatcaagccgtagtcgtgctggagaacctcaacttcgggtttaagtccaagcgcaccggcatcgcggagaaggcggtgtaccagcagttcgagaagatgctgatcgacaagctgaactgcctggtgctcaaggactaccctgcggagaaggtcggcggggtcttgaacccgtaccagctaaccgaccagttcacgagcttcgccaaaatgggcacgcagtccggattcttgttttatgtcccggctccatatacaagtaagatcgacccgctgacagggtttgttgacccattcgtgtggaagaccatcaagaaccacgagagcaggaaacacttcttagagggcttcgacttcctgcattacgacgttaagacaggcgacttcatcctgcacttcaagatgaaccgcaacctgtcgttccagaggggcctgcccggcttcatgcccgcctgggatatcgtctttgagaagaatgagacgcagttcgacgcgaaggggacgccgttcatcgctggaaagcggatcgtgccggtcatcgagaaccaccgcttcacgggtcgctaccgagatttataccccgccaacgaactaattgcgctgctggaggagaaggggatcgtgttccgagatggcagcaacattctcccgaagctgctggagaacgacgactcgcacgctattgacacgatggtcgccctcatacggagcgtgcttcagatgcggaacagtaacgctgccacgggcgaggactacattaactcccccgtccgcgacctcaacggggtctgcttcgatagccgcttccagaacccggagtggcctatggatgcggacgcgaacggggcctaccacatcgccctcaagggccaactcctgctcaaccacttgaaggaaagcaaagacctcaaattgcagaatggcatcagtaaccaggactggctcgcgtacatccaggaactgagaaacgggtccaagaagcggcgtatcaagcaagattga

SEQ ID NO: 68 - DNA, 3987 bp, Artificial sequence
  Synthetic polynucleotide
atggcgggaagcaaaaagcgccggattaagcaagacacgcagttcgagggcttcacgaacctctaccaagtcagcaagaccctccggttcgagctgataccacagggaaagacgctcaagcacatccaggaacagggcttcatcgaggaggacaaggcgcgcaacgaccactacaaggagttgaaaccgatcatcgaccgcatctacaagacgtacgccgaccagtgcctccagctcgtgcagctcgactgggagaacctctccgccgccattgactcgtaccggaaggagaagactgaggagacccgcaacgccctgatcgaggagcaagcaacctaccggaacgccatccacgactacttcatcggccgcaccgacaacctcaccgacgcgatcaacaagcggcacgcggagatatacaaagggctgttcaaggcggagctgttcaacggcaaggtgctcaagcagctagggacggtgaccacgaccgagcacgagaacgcgctcctccgcagcttcgacaagttcaccacctacttcagcggcttctaccggaaccgcaagaatgtgttcagcgcggaggacatcagcacggccatcccgcaccgcatcgtccaggacaacttcccgaagttcaaggagaactgccacatcttcacccgcctgataaccgccgtcccctccctgcgggagcacttcgagaacgtcaaaaaggcaattgggatcttcgtctcgaccagcattgaggaggtgttcagcttccccttctacaaccagctcctcacccagacgcagatcgacctgtacaatcagttgctcggcgggataagccgcgaggcgggaaccgaaaaaatcaaggggctgaacgaagtgttgaacctcgccatccagaagaacgacgagaccgcgcacatcatcgcctccctgccccaccggttcatcccgctgttcaagcagatcctctctgaccggaacaccctgtccttcattcttgaggagttcaagtcggacgaggaggtcatccagagcttctgcaagtacaagacgctgctacggaacgagaacgtgctggagacggcggaggcactgttcaacgagctaaacagcatcgacctcacgcacatcttcatcagtcacaagaaactggagaccatctcctccgcgctgtgcgaccactgggacacgctcaggaacgcgctctacgagcgccgaatcagtgagctgacgggcaagatcacgaagtccgcgaaggagaaggtgcagcggtccctcaagcacgaggacatcaacctccaggagatcatctcagcggctgggaaagagctgtccgaggcgttcaagcagaaaacgagcgaaatcctgtcccacgcgcacgcggccctggatcagcctctgccgacgaccctcaagaaacaagaagaaaaggaaatcctcaagtcgcagctcgactcgctgctgggcctgtaccatctcctcgactggttcgccgtggacgagagcaacgaggtggaccccgagttctccgcgcggcttacggggatcaagctggagatggagcccagcctgtccttctacaacaaggcgcgcaactacgccaccaagaagccctacagcgtggagaagttcaagctcaacttccagatgcccactctcgcacgtgggtgggacgtcaaccgcgaaaaaaataatggggcgatcctgttcgtcaagaacggcctgtactacttgggcatcatgccgaaacagaagggccgctacaaggccctgagcttcgaaccgaccgagaaaacgagcgaggggttcgacaagatgtactacgactacttccccgacgccgcgaagatgattccaaagtgctccacgcagcttaaggccgtgacggcccacttccagacgcacacgaccccgatcctcctcagcaacaacttcatcgagcccctggagatcacgaaggagatatacgacctgaacaacccggagaaggagcccaagaaattccagaccgcctacgccaagaagacaggcgaccaaaagggttacagggaggccctctgcaagtggatcgacttcactagggacttcctgtccaagtacaccaagactacctctatcgacctgtccagcctccgcccgtcgtcccagtacaaagatttgggcgagtattacgcggagctgaacccactgctctaccacatcagcttccagcgcatcgcggagaaggagatcatggacgcagtggagacgggcaagctatacctatttcagatatacaacaaagacttcgctaagggacaccacggcaagcctaacctgcacaccctctactggacggggctcttcagcccggagaacctcgccaagacctcgatcaagctcaacggccaggccgagctgttctaccggcccaagtcccgcatgaagcggatggcccaccggctcggggagaaaatgctcaacaagaaattgaaggaccaaaaaacgccgatacccgacaccctataccaggagctgtacgactatgtgaaccaccgcctgagccacgacctcagcgacgaggcgcgggccctcctgccgaacgtcatcacaaaggaggtcagccacgagatcatcaaggaccggcgcttcacctccgacaagtttttctttcacgtgcccatcacgctcaactaccaggccgccaactcgccgtccaagttcaaccagcgcgtgaacgcctacctcaaggagcaccccgagaccccgatcatcgggattgaccgaggggagcggaacctcatctacatcaccgtcatcgacagcaccgggaagatccttgaacagcggtcgctcaacaccatccagcagttcgactaccagaagaaactcgacaaccgggagaaggagagagtggcggcccgccaggcttggtccgtcgtcgggacgattaaggacttgaaacaaggttacctgtcgcaagtgatccacgagatcgttgacctgatgatccactaccaagccgtcgtggtcctggagaacctcaacttcggcttcaagagcaaacgaaccggcatcgcggagaaggccgtgtaccagcagttcgaaaaaatgctgatcgacaagctgaactgcctcgtgctcaaggactaccccgctgagaaggtcggcggggtgctgaacccgtaccagctcactgaccagttcaccagcttcgcaaagatgggcacccagtccggcttcctgttctacgtgcctgcgccatacacctcgaagatcgacccgctcaccgggttcgtggaccccttcgtctggaagaccatcaagaaccacgagagccgcaagcacttcctggagggcttcgacttcctccactacgacgtcaagaccggggacttcatcctgcacttcaagatgaaccgcaacctcagtttccagcgcggcctgccggggttcatgcccgcttgggatatagtcttcgagaagaatgagacgcagttcgacgcgaagggcaccccgttcatcgccgggaagcgcatcgtgccggtcatcgagaaccaccggttcaccgggcgctaccgcgacctatacccggcgaacgagttgatcgccctcctggaggagaagggcatcgtgttccgcgacggctccaacatcctcccgaagctgctcgaaaacgacgactcccacgccatcgacacgatggtcgcgctgatccggtcggtgctccagatgcggaactccaacgccgcgacgggcgaggactacatcaacagtccggtccgcgatctgaacggcgtctgcttcgactcccggttccagaaccccgagtggccgatggacgcggacgcgaacggcgcataccacatcgccctaaaagggcaattgctgctcaaccacctcaaggaatccaaagacctaaagctccagaacggcatctccaaccaggactggctggcgtacatccaggaactgcggaacgggagcaaaaaacgtcggatcaagcaagattga

SEQ ID NO: 69 - DNA, 3987 bp, Artificial sequence
  Synthetic polynucleotide
atggcgggctccaagaaacgccggattaagcaagatacccagttcgaggggttcacgaacctctaccaagtgagcaagaccctccgattcgaactgattcctcaggggaagaccctcaagcacatccaggagcaagggttcatcgaggaggacaaggcgcggaacgaccactacaaggaactcaaacccatcatcgaccgcatctacaagacctacgccgatcagtgcctccagctcgtgcagttggactgggagaacctcagcgcggccattgactcctaccggaaggagaaaacggaggagacgcgcaacgcgctcatcgaggaacaggcaacctatcgcaacgccatccacgactacttcatcgggaggactgacaacctcactgacgcgattaacaagcgccacgcggagatatacaagggactcttcaaagcggagctgtttaacggcaaggttctcaagcaactcggcactgtgaccacgaccgagcatgagaacgccctgctccgctccttcgacaagttcaccacctacttctccgggttctaccgcaaccgcaagaatgtcttcagcgcggaggacatcagcacggccattccacatcgaatcgtccaagataacttcccgaagttcaaggagaactgccacatcttcacccgactcattactgctgtaccgtcgttacgcgaacacttcgagaacgtcaagaaggcaattggaatcttcgtctctacgtcaatagaggaggtgttcagcttccctttctacaaccagctccttacgcagacccagatagacctgtacaatcagctcctcggtgggatcagccgggaggcggggactgagaagattaaagggctcaacgaggtcttgaacctggccatccaaaaaaacgatgagacggcgcacatcatcgcctcgctgccccaccggttcatcccgctgttcaagcagatcctcagtgacaggaacaccttgagctttatcctagaggagttcaagagcgacgaggaggtgatccagagcttctgcaagtacaaaaccctgctgaggaacgagaacgtcctggagacggcggaggcgctgttcaacgagctgaactctatcgacttaactcacatattcatctcgcacaagaagctggagactattagctctgcactctgcgaccactgggacaccctccgcaacgcgctctacgagcgccgcatctcggagctgaccgggaagatcaccaaatccgcgaaggaaaaggtccagcgttccctcaaacacgaggatattaacttacaggagattatctcagcggctgggaaggagttgtcagaggcgttcaagcagaaaacttccgagatcctgagccacgcgcacgcagcgctcgaccagcctctgcccaccaccctcaaaaagcaggaagaaaaagagatcctcaagagccagttggactccctgctggggctctatcaccttctcgactggttcgccgtcgatgagtcgaacgaggtggaccccgagttctccgcccggctgaccggcatcaagctagagatggagccgtccctcagcttctacaataaggcccgcaactacgcgaccaaaaaaccctacagcgtggagaagttcaagctgaacttccagatgccgaccttagcacgcggttgggacgtaaacagggagaagaacaatggagccatcctgttcgtcaagaacgggctttactacctcgggataatgcccaagcagaagggccgctacaaggccctttccttcgagccgacggagaaaacctccgaggggttcgacaagatgtactacgactacttccccgacgccgccaagatgatcccgaagtgctcaacgcagctaaaagccgtgaccgcccacttccagacccacacgacgccgatcctgctgagcaacaacttcatcgagccccttgagatcactaaggagatatacgacctgaacaaccccgagaaggagcccaagaagtttcaaaccgcctacgccaaaaaaactggcgaccaaaagggctacagggaggcgctgtgtaagtggatcgacttcacacgcgacttcctttcgaagtatacgaagacaacctctattgacctgagcagcctgcgtcctagctcccagtacaaagatttgggcgagtactacgcggagcttaatccactactctaccacatctcattccagcgcatcgctgagaaggaaatcatggacgcggtggagacaggcaaactgtacctcttccagatatacaacaaagacttcgctaaggggcaccacgggaagcccaaccttcatacgctctactggacgggcctattcagccccgaaaatctggccaagacctccatcaagctgaacggccaagcggagctgttctacagacccaagagccggatgaagcggatggcccacaggctcggcgagaaaatgcttaacaaaaagttgaaggaccagaaaacccctatccccgacaccctctaccaggaactgtacgactacgtgaaccacaggctctcgcacgacctttccgacgaggcccgtgccctactcccgaacgtcattaccaaagaggtttcgcacgagatcatcaaggaccggcggttcacgagcgacaagtttttctttcacgtccccatcacccttaactaccaggcggccaactccccatccaagttcaaccagcgtgtgaatgcctacctcaaggagcacccagagaccccgatcattgggatcgaccggggcgagcggaacctgatctacatcaccgtcatcgactcgacgggcaagattcttgagcagagatcgttgaataccatacagcagttcgactaccagaagaaactcgacaaccgcgagaaggagcgcgtggcggcccgccaggcgtggtccgtcgttgggacgattaaggacttgaaacaaggttatctgtcccaagtcatccacgagatcgttgatctgatgatccactatcaggcagtggtggtgctggagaatctcaacttcggcttcaagagtaagcggacgggaatcgccgagaaggccgtgtaccagcagttcgagaagatgctgatcgacaagctcaactgccttgtgctgaaagactacccggccgagaaggtcggcggcgtcctcaacccgtaccaacttaccgaccagttcacctccttcgccaagatgggcactcagtccgggttcttgttctacgtccccgcaccttacacctctaagatcgaccctctgactggcttcgtagatccattcgtgtggaagaccattaagaaccacgagagccgcaagcacttcctggagggcttcgacttcctgcactacgacgtgaagaccggggacttcatccttcacttcaagatgaaccggaacctcagcttccagcggggcctgccggggttcatgcccgcctgggacatcgtgttcgagaagaacgagacccagttcgacgcgaagggcacgcccttcatcgccgggaagcgtatcgtgccggtgatcgagaaccatcgtttcacgggtcgctaccgtgacctctacccggcgaacgagcttatcgcactcctggaggagaagggcatcgtcttccgggacggctccaacatcctcccgaaactgctggaaaacgacgactctcacgccatcgacacgatggtggccctcatccggtccgtgctccaaatgcggaacagcaacgccgccaccggtgaggactacatcaacagcccggtccgggatctgaacggggtgtgcttcgattcgcggttccagaatcctgagtggccgatggacgcggatgcaaacggggcgtaccacatcgcgctcaagggccagttacttctgaaccaccttaaggagtctaaagatttgaaactccagaacgggatctcgaaccaggactggctggcctacatccaagagttgcggaacggcagcaagaagcggcggattaagcaagattag

SEQ ID NO: 70 - DNA, 4101 bp, Artificial sequence
  Synthetic polynucleotide
gacaagaagtacagcatcgggctggcgatcgggaccaactccgtcggctgggctgtgattaccgacgagtacaaggtgccatccaagaagttcaaggtcctcggcaacactgaccggcacagcattaagaagaacctgattggggcgctgctgttcgattcgggggagactgcggaggcgaccaggctgaagcggactgcgcgccggaggtacaccaggaggaagaatcggatctgctacctccaggagattttctcgaatgagatggccaaggtggacgattccttcttccatcgcctggaggagtcgttcctcgttgaggaggacaagaagcatgagaggcatcccattttcgggaatatcgttgacgaggtggcttaccatgagaagtacccgaccatctaccatctgcggaagaagctcgtcgattcgaccgataaggccgacctgcggctgatctacctggccctcgcgcacatgattaagttccggggccatttcctcatcgagggcgacctcaacccggacaactcggacgtggataagctcttcattcagctcgtgcagacatacaaccagctcttcgaggagaatcccattaacgcctcgggggtcgacgctaaggctattctctcggctcggctgtcgaagtcgcgccggctggagaatctcattgcccagctcccaggcgagaagaagaacggcctcttcggcaacctgattgccctgtcgctggggctcacaccgaatttcaagtcgaacttcgacctcgccgaggacgctaagctccagctcagcaaggatacttacgatgatgacctcgataacctgctcgcccagattggggatcagtacgcggatctgttcctcgcggccaagaatctcagcgatgctattctcctgtcggacattctccgcgtcaacacagagattactaaggccccactgtcggcgagcatgattaagaggtacgatgagcatcatcaggacctgacactgctcaaggcgctggtccggcagcagctccccgagaagtacaaggagattttcttcgatcagtcaaagaatgggtacgcgggctacattgatggcggcgcgtcccaggaggagttctacaagttcattaagcccatcctggagaagatggacgggaccgaggagctgctggtgaagctcaatcgggaggacctgctccggaagcagcgcacattcgacaatggctcgattcctcaccagattcacctgggcgagctgcacgccattctccgcaggcaggaggacttctacccgttcctcaaggacaaccgcgagaagatcgagaagatcctgaccttccggattccatactacgtggggccgctcgcgcgggggaactcccggttcgcgtggatgactcgcaagtccgaagaaacgattacaccgtggaatttcgaggaggtcgtcgacaagggcgctagtgcgcagtcattcattgagaggatgaccaatttcgataagaacctgcctaacgagaaggtgctgccgaagcattcgctgctctacgagtacttcaccgtttacaatgagctgaccaaggtgaagtatgtgactgagggcatgaggaagccagcgttcctgagcggcgagcagaagaaggctatcgtggacctgctcttcaagactaaccggaaggtgactgtgaagcagctcaaggaggactacttcaagaagattgagtgcttcgattccgttgagattagcggggtggaggatcggttcaatgcttcgctcgggacataccacgatctcctgaagatcattaaggataaggacttcctcgacaacgaggagaacgaggacattctcgaagatattgtcctgaccctcaccctcttcgaggatcgggagatgatcgaggagaggctcaagacatacgctcatctgttcgatgataaggtcatgaagcagctgaagcgcaggcggtacacagggtgggggcggctgagccggaagctgatcaacgggattcgggataagcagtccgggaagacaattctcgacttcctcaagtccgacgggttcgctaaccggaacttcatgcagctcattcatgatgactcgctgacattcaaggaggatattcagaaggcgcaggtttcggggcagggcgactcgctccacgagcatattgcgaatctggcgggctcccccgcgattaagaagggcattctgcaaaccgtcaaggtggttgatgagctggtcaaggtcatggggcggcataagccagagaatattgtcatcgagatggcgcgggagaatcagaccacacagaaggggcagaagaactcacgggagcggatgaagcgcatcgaggagggcatcaaggagctggggtcgcagatcctgaaggagcatcccgtggagaacactcagctgcaaaatgagaagctgtacctctactacctccagaacgggagggacatgtatgtggatcaggagctggatattaataggctgagcgattacgatgtcgaccacattgtcccacagtcgttcctgaaggacgacagcattgacaacaaggtgctgacccgctcggataagaacaggggcaagagcgataatgttccaagcgaggaggttgtgaagaagatgaagaactactggcggcagctcctgaacgcgaagctcatcacacagcggaagttcgacaacctcaccaaggctgagcgcgggggcctgagcgagctggacaaggcggggttcattaagaggcagctggtcgagacacggcagattacaaagcatgttgcgcagattctcgattcccggatgaacaccaagtacgatgagaacgataagctgattcgggaggtcaaggtaattaccctgaagtccaagctggtgtccgacttcaggaaggacttccagttctacaaggttcgggagatcaacaactaccaccacgcgcatgatgcctacctcaacgcggtcgtggggaccgctctcatcaagaagtacccaaagctggagtcagagttcgtctacggggattacaaggtttacgacgtgcggaagatgatcgctaagagcgagcaggagattggcaaggctaccgctaagtacttcttctactccaacatcatgaacttcttcaagacagagattaccctcgcgaatggcgagatccggaagaggcccctcatcgagacaaatggggagacaggggagattgtctgggataaggggcgggatttcgcgaccgtccggaaggtcctgtcgatgccccaggttaatattgtcaagaagactgaggtccagactggcggcttctcaaaggagtcgattctcccaaagaggaactccgataagctcattgctcggaagaaggattgggaccccaagaagtacgggggattcgactcccccactgttgcttactctgttctggttgttgctaaggtggagaaggggaagtcgaagaagctgaagagcgtgaaggagctgctcgggattacaattatggagaggtcatccttcgagaagaatcccatcgacttcctggaggccaagggctacaaggaggtgaagaaggacctgattattaagctgcccaagtactcgctcttcgagctggagaatgggcggaagcggatgctggcgtccgcgggggagctgcaaaaggggaacgagctggcgctcccctccaagtatgtgaacttcctctacctggcgtcgcactacgagaagctgaaggggtccccagaggataatgagcagaagcagctcttcgtcgagcagcataagcactacctggacgagattatcgagcagattagcgagttctcgaagcgggtcatcctcgcggatgcgaacctggataaggtgctcagcgcctacaataagcaccgggacaagccgattcgggagcaggcggagaatattattcacctcttcacactcaccaacctcggggcaccagctgcgttcaagtacttcgacactactatcgaccggaagcggtacacctcgacgaaggaggtgctcgacgccaccctcattcaccagtcgatcacaggcctgtacgagacacggattgacctgtcccagctcgggggcgac

SEQ ID NO: 71 - DNA, 4101 bp, Artificial sequence
  Synthetic polynucleotide
gacaagaagtactccattggcctggcgattgggacaaactcggtggggtgggccgtgattacggatgagtacaaggttccaagcaagaagttcaaggtcctcgggaacacagatcggcattcgattaagaagaatctcattggggcgctcctcttcgactcgggggagacagcggaggctaccaggctcaagcggacagccaggcggcggtacacaaggcggaagaatcgcatctgctacctccaggagattttctcgaatgagatggcgaaggtggacgacagcttcttccatcggctggaggagtccttcctggtggaggaggataagaagcacgagaggcatccaattttcgggaacatcgtggacgaggttgcgtaccatgagaagtaccctacaatctaccatctgcggaagaagctggttgactccacagacaaggcggacctgaggctgatctacctcgctctggcccacatgattaagttccgcgggcatttcctgatcgagggggacctgaatcccgacaattcggatgtggacaagctcttcatccagctggtgcagacctacaaccagctgttcgaggagaatcccatcaatgcgtcgggcgttgacgctaaggccattctgtccgctaggctgtcgaagagcaggaggctggagaacctgatcgcccagctgccaggcgagaagaagaatgggctcttcgggaatctgattgcgctctccctggggctgacaccgaacttcaagagcaatttcgatctggctgaggacgcgaagctccagctctcgaaggacacttacgacgatgacctcgataacctcctcgcgcagatcggggaccagtacgctgatctcttcctcgccgctaagaacctctcggatgctatcctgctctccgacattctccgggttaataccgagattacaaaggccccactgtcggcgtccatgatcaagcggtacgatgagcatcatcaggatctcaccctgctcaaggccctcgtgcggcagcagctgcccgagaagtacaaggagattttcttcgaccagagcaagaatgggtacgctggctacattgacggcggggcctcacaggaggagttctacaagttcatcaagccaatcctggagaagatggatgggacagaggagctgctggtgaagctcaaccgggaggatctgctcaggaagcagcggacgttcgacaacgggtcgattccccatcagatccacctgggggagctgcacgcgatcctgcgccggcaggaggatttctaccctttcctgaaggataatcgggagaagatcgagaagattctcaccttccggattccctactacgtcgggccactcgcgcggggcaatagcaggttcgcctggatgacacggaagagcgaggagacaatcaccccctggaacttcgaggaggttgtcgacaagggggcgtccgcccagtcattcattgagcggatgaccaatttcgacaagaatctgccaaatgagaaggttctcccaaagcatagcctcctctacgagtacttcactgtttacaacgagctgaccaaggtgaagtatgtgaccgagggcatgcggaagcccgcgttcctgtccggcgagcagaagaaggccattgtggacctcctgttcaagaccaatcgcaaggtcacagtcaagcagctcaaggaggattacttcaagaagatcgagtgcttcgactcggttgagattagcggggtggaggatcggttcaacgcgagcctcggcacttaccacgacctcctgaagatcatcaaggataaggacttcctcgacaacgaggagaacgaggatattctggaggacatcgtgctcaccctgacgctgttcgaggatcgggagatgatcgaggagcgcctgaagacctacgctcatctcttcgatgataaggtcatgaagcagctgaagaggaggcggtacaccgggtggggccgcctgagcaggaagctcattaacgggatcagggacaagcagagcggcaagaccatcctggacttcctcaagagcgatggcttcgccaaccggaatttcatgcagctcatccacgacgactccctcaccttcaaggaggacattcagaaggctcaggtcagcggccagggcgactcgctgcatgagcacatcgctaacctggcgggcagcccagccatcaagaagggcatcctccagacagtgaaggtcgtggatgagctggtgaaggtcatgggccggcataagcccgagaatattgtgattgagatggcgcgggagaatcagaccactcagaagggccagaagaactcgcgggagcgcatgaagaggatcgaggaggggattaaggagctgggcagccagattctcaaggagcaccccgtggagaatacccagctccagaacgagaagctgtacctctactacctccagaatgggcgggacatgtatgttgatcaggagctggacatcaatcgcctctcggattacgacgtggaccacatcgtgccccagagcttcctgaaggatgatagcatcgacaataaggtcctgacccgctccgacaagaatcgcggcaagagcgacaacgtgccgagcgaggaggtcgtgaagaagatgaagaactactggcggcagctgctgaacgcgaagctcattacacagcggaagttcgataacctgacgaaggcggagaggggcggcctctccgagctggacaaggcgggcttcattaagaggcagctcgtggagactcgccagatcaccaagcacgtggctcagatcctcgatagccggatgaatacgaagtacgatgagaatgacaagctcatccgggaggtgaaggtaatcaccctgaagtcaaagctcgttagcgatttccggaaggacttccagttctacaaggtgcgggagattaacaactaccatcatgcgcacgatgcgtacctcaatgcggtggtgggcacagccctgattaagaagtaccccaagctggagagcgagttcgtctacggggactacaaggtgtacgatgttcggaagatgatcgccaagagcgagcaggagattgggaaggccaccgctaagtacttcttctactcgaatattatgaatttcttcaagaccgagatcacactcgctaatggggagattcggaagcggcccctcatcgagactaacggggagactggcgagattgtgtgggacaaggggcgcgacttcgctaccgtgcgcaaggtcctctcgatgccccaggttaatattgttaagaagacagaggtgcagacgggcgggttctccaaggagtctatcctgccgaagcggaactcggacaagctgatcgcccgcaagaaggattgggaccccaagaagtacgggggattcgatagcccaaccgtggcttacagcgtcctggtggtcgccaaggttgagaaggggaagtcgaagaagctcaagagcgttaaggagctgctgggcatcaccatcatggagcggtccagcttcgagaagaatcctatcgacttcctggaggctaaggggtacaaggaggtcaagaaggacctgatcattaagctgcccaagtactctctgttcgagctggagaacgggaggaagcggatgctggcgtctgctggcgagctacagaagggcaatgagctggcgctcccctcgaagtatgtcaacttcctctacctggcttcccattacgagaagctgaagggctcgcccgaggataatgagcagaagcagctcttcgtggagcagcacaagcactacctcgacgagatcattgagcagatttcggagttctcgaagcgggtcattctcgcggacgcgaacctcgacaaggtcctctcggcgtacaacaagcaccgggacaagcccatccgggagcaggccgagaacattatccacctcttcacactgaccaacctcggcgctcccgccgcgttcaagtacttcgacaccaccattgaccgcaagagatacacatccaccaaggaggtgctggacgcgaccctcatccaccagagcatcacaggcctctacgagacacggatcgacctctcgcagctcgggggcgat

SEQ ID NO: 72 - DNA, 4092 bp, Artificial sequence
  Synthetic polynucleotide
gacaagaagtactcgatcggcctggcgattggcacaaacagcgtggggtgggctgtgatcactgatgagtacaaggtgccatcgaagaagttcaaggtgctggggaatacagaccggcattcgatcaagaagaatctcattggcgctctcctcttcgattccggcgagactgctgaggcgacccgcctgaagcgcaccgcccggcggcgctacactcggcggaagaataggatttgctacctccaggagattttctcgaatgagatggccaaggtggatgacagcttcttccaccgcctggaggagtcgttcctggtcgaggaggacaagaagcatgagcggcaccctatcttcgggaatatcgttgatgaggtcgcctaccacgagaagtaccccactatctaccatctccgcaagaagctcgtggacagcacagataaggccgacctccgcctgatctacctcgccctcgcgcacatgattaagttccgggggcacttcctcattgagggggatctgaatcccgataactccgacgtggacaagctgttcatccagctggtgcagacatacaaccagctgttcgaggagaatcccatcaacgcgagcggcgtggacgctaaggccattctgtcggctaggctctcgaagtcgaggcggctggagaacctgattgcgcagctccccggcgagaagaagaacgggctgttcgggaatctcatcgccctctccctcggcctcacaccaaacttcaagagcaatttcgacctggctgaggacgctaagctgcaactctcaaaggatacatacgatgacgacctggacaatctcctggctcagatcggcgaccagtacgctgacctgttcctcgcggccaagaatctgtcggacgcgattctcctcagcgacatcctgcgcgtcaataccgagattacgaaggctccactgtctgcgtcaatgattaagcggtacgatgagcatcaccaggatctgaccctcctgaaggcgctcgtgcggcagcagctgcccgagaagtacaaggagattttcttcgatcagagcaagaatggctacgccggctacatcgacgggggcgcgagccaggaggagttctacaagttcatcaagcccatcctggagaagatggacggcaccgaggagctactcgtgaagctcaatcgggaggatctcctccggaagcagcggacattcgataacgggtctatcccacaccagatccacctcggcgagctgcatgcgattctgcggcggcaggaggatttctaccctttcctgaaggacaaccgggagaagatcgagaagatcctcacattccggattccatactacgtcggccccctggcgaggggcaatagccggttcgcgtggatgacaaggaagtccgaggagactattaccccgtggaatttcgaggaggtggttgacaagggcgcttccgcgcagagcttcattgagcggatgacaaacttcgacaagaatctccccaacgagaaggtcctgccgaagcatagcctcctgtacgagtacttcaccgtctacaatgagctaactaaggtcaagtatgtgacagagggcatgaggaagccagccttcctctcaggcgagcagaagaaggccattgtggacctcctgttcaagacaaaccgcaaggtgacagtgaagcagctgaaggaggattacttcaagaagattgagtgcttcgactcagtggagatttcaggcgtggaggatcggttcaacgcgagcctggggacttaccacgacctgctgaagattattaaggacaaggacttcctggataacgaggagaatgaggacatcctggaggatattgtgctcaccctcaccctgttcgaggacagggagatgattgaggagaggctcaagacctacgcgcacctgttcgatgacaaggtcatgaagcagctgaagaggcggcgctacactgggtggggccgcctgtcgcggaagctgatcaacggcattcgggataagcagtccgggaagaccattctggatttcctgaagtcggacggcttcgccaacaggaatttcatgcagctgatccacgacgactccctcaccttcaaggaggacattcagaaggcccaggttagcggccagggggactcactccacgagcatattgccaatctggccggctctccagctatcaagaagggcatcctgcaaacagttaaggttgttgacgagctggttaaggtcatggggcggcataagcccgagaacattgtcatcgagatggctcgggagaaccagacaactcagaagggccagaagaactccagggagcgcatgaagcggattgaggagggcattaaggagctggggtcccagatcctcaaggagcaccctgtcgagaacactcagctgcaaaacgagaagctctacctgtactacctccagaacgggcgggatatgtatgtggatcaggagctggacatcaacaggctctccgactacgacgtggatcacattgtcccacagtctttcctcaaggatgattccatcgacaacaaggtgctgacgcgcagcgacaagaatagggggaagtcggacaacgttccgagcgaggaggtcgtgaagaagatgaagaattactggaggcagctcctgaatgcgaagctgatcactcagaggaagttcgacaatctgacaaaggcggagaggggcgggctctcggagctggataaggcgggcttcatcaagcggcagctcgttgaaacccggcagatcaccaagcatgtcgcccagatcctcgatagccgcatgaacaccaagtacgatgagaacgacaagctcattcgggaggttaaggtcattacgctgaagtccaagctcgtcagcgacttcaggaaggatttccagttctacaaggttcgggagattaacaactaccaccacgcgcatgatgcgtacctgaacgctgttgtcggcactgctctcatcaagaagtacccaaagctggagtccgagttcgtctacggggactacaaggtctacgatgtccggaagatgatcgccaagtcggagcaggagatcgggaaggctactgcgaagtacttcttctacagcaacattatgaatttcttcaagacggagattacgctggcgaacggggagattaggaagaggcccctcattgagactaatggggagacaggcgagattgtttgggacaagggccgcgacttcgcgactgtgcggaaggtcctgtccatgccacaggtgaatattgttaagaagacagaggtgcagactgggggcttctcgaaggagagcattctcccaaagcggaacagcgataagctcatcgcgcgcaagaaggattgggaccctaagaagtacggcggcttcgattctcccactgtggcctactccgttctcgtggttgccaaggttgagaaggggaagtcgaagaagctgaagtcggtcaaggagctgctcgggattacaatcatggagcggagcagcttcgagaagaaccctattgatttcctggaggccaagggctacaaggaggttaagaaggatctcattatcaagctccctaagtactctctgttcgagctggagaatggccggaagaggatgctggcctcggctggcgagctacagaaggggaatgagctggccctcccgtcgaagtatgtgaatttcctgtacctcgcgtcgcactacgagaagctcaagggcagcccggaggataatgagcagaagcagctcttcgtggagcagcataagcactacctggacgagatcattgagcagatcagcgagttctcgaagcgggttattctggctgatgctaacctggacaaggttctgagcgcctacaataagcatcgcgacaagccgattcgcgagcaggcggagaatattatccacctgttcaccctcactaacctcggggctcccgcggccttcaagtacttcgataccacaatagataggaagcggtacacctcgacgaaggaggtcctcgacgccacactcatccatcagtcgattacaggcctgtacgagacacggattgacctctcgcagctg

SEQ ID NO: 73 - DNA, 4101 bp, Artificial sequence
  Synthetic polynucleotide
gacaagaagtattccataggcctggctatcggcaccaacagcgtgggctgggccgtcatcaccgacgagtacaaagtgccgagtaaaaagttcaaagtgctcggcaacaccgaccgccactccataaagaaaaacctgatcggggcgctcctgttcgacagcggcgagacggcggaggccacccgcttgaaacgcacggcccgacggcgctacacgcggcgcaagaaccggatctgttacctacaggagattttctctaacgagatggcgaaggtggacgactcgttctttcaccgcctcgaagagtccttcctcgtggaggaggacaagaaacacgagcgccacccgatcttcggcaacatcgtggacgaggtggcctaccacgagaagtacccgaccatctaccacctccggaagaaactcgtggacagcacggacaaggccgacctgaggctcatctacctcgccctggcgcacatgattaagttccggggccacttcctgatcgagggcgacctgaacccggacaacagcgacgtggacaagctgttcatccagctagtccagacctacaaccagcttttcgaggaaaaccccatcaacgccagcggggtggacgcgaaggcgatcctgtccgcccggctgagcaagtcccggcggctggagaacctcatcgcgcagttgcccggcgagaagaagaacgggctgttcgggaacctgatcgccctctccctggggctcaccccgaacttcaagtccaacttcgacctcgccgaggacgccaaactacagctgagcaaggacacctacgacgacgacctcgacaacctgctggcccagatcggggaccagtacgcagacctgttcctcgccgccaagaacctctccgacgccatcctgctgtcggacatcctgcgggtgaacacggagatcacgaaggccccgctctcggcctcgatgattaaacgctacgacgagcaccaccaggacttgaccctcctcaaggcgctggtccgccagcagcttcccgagaagtacaaggaaatctttttcgatcagagcaagaacgggtacgccgggtacatcgacggcggggcgtcccaggaggagttctacaagttcatcaagcccatcctggagaaaatggacgggaccgaggagctgctcgtgaagctcaaccgcgaagatttgctccgcaagcagcgcacgttcgacaacgggtcgatcccgcaccagatccacctgggcgagctgcacgcgatcctcaggcgtcaggaagacttctaccccttcctcaaggacaaccgcgagaagatagagaagattctgaccttcagaattccttattacgtgggcccgctggctcggggcaactcgcgcttcgcctggatgacgcgcaagtccgaggagaccatcaccccgtggaacttcgaggaggtggtggataagggtgcctcggcccagtccttcatcgagcggatgaccaacttcgacaagaacctgccgaacgagaaggtgctccccaagcacagcctgctctacgaatatttcacggtgtacaacgagctgacgaaggtcaagtacgtgaccgagggaatgaggaaacctgcattcctctccggggagcagaagaaagccatagtcgacctcctgttcaagaccaaccggaaggtcaccgtcaagcagctcaaggaggactacttcaagaagatcgagtgcttcgattcagtggagatcagcggcgtcgaggaccggttcaacgccagcctgggcacctaccacgacctgctcaagatcatcaaggacaaggacttcctcgacaacgaggagaacgaggacatcctggaggacatcgtgctgaccctgacgctcttcgaggaccgcgagatgatcgaggagcgcctcaagacctacgcccacctgttcgacgacaaggtgatgaagcagctcaagcggcggagatatactgggtggggccgcctctcccggaagctcattaacggtatcagggataagcagtccgggaagacgatcctcgacttcctcaagtcggacgggttcgccaaccgcaacttcatgcagctcatccacgacgactccctgacgttcaaggaggacatccagaaggcccaagtgtctggtcaaggtgactcgctccacgagcacatcgccaacctcgcgggcagcccggccatcaagaagggaatactccagaccgtcaaggtggtggacgagctggtgaaggtcatgggccgccacaagccggagaacatcgtcatcgagatggcgcgggagaaccagaccacgcagaaggggcagaaaaatagccgtgagcgcatgaagcgcatcgaggaggggattaaggagttgggcagccagatcctcaaggagcaccctgtggagaacacgcagttgcaaaacgagaagctctacctgtactacctccagaacgggagggatatgtacgtggaccaagaactggacatcaaccgcctgtccgactacgacgtggaccacatcgtgccgcagagcttcctcaaggacgacagcatcgacaacaaggtgctcacccggtccgacaagaatcggggcaagtccgacaacgtgcccagcgaggaggtcgtcaaaaagatgaaaaactactggcgacaactactgaacgccaagctcatcacccagcgcaagttcgacaacctcacaaaagccgagcgcggcgggttgagcgagctggacaaggccgggttcatcaagcgccagctcgtcgagacgcgccagatcacgaagcacgtcgcgcagatactcgacagccggatgaacaccaagtacgacgagaacgacaagctcatccgggaggtgaaggtcatcaccctcaagtcgaagctcgtgagcgacttccgcaaggacttccagttctacaaggtccgggagatcaacaactaccaccacgcccacgatgcttatcttaacgccgtggtggggacggccctcattaagaaatacccgaagctggagtcggagttcgtgtacggcgactacaaggtgtacgacgtcaggaagatgatcgccaagtccgaacaggagatcgggaaggccacggcgaaatacttcttctacagcaacatcatgaacttcttcaagaccgagatcaccctcgccaacggcgagatccgcaagcgcccgctcatcgagacgaacggggagaccggcgagatcgtctgggacaaggggcgcgacttcgccactgtgcggaaggtgctgtcgatgccccaggtcaacatcgtcaagaagacggaggtccagacgggcgggttcagcaaggagagcatcctgccgaagcgcaacagcgacaagctgatcgcccgcaaaaaggactgggatccaaaaaagtacggcggcttcgacagccccaccgtcgcctacagcgtcctcgtcgtcgctaaagtcgagaagggcaagtccaaaaagctcaagagcgtcaaggagctgctcgggatcaccatcatggagcggtccagcttcgagaagaacccaattgatttcctggaggcgaagggctacaaggaggtcaagaaagacctcatcataaagctgccgaagtactcactcttcgagctggagaacgggcgcaagcggatgctggcgtcggccggagagctccaaaagggcaacgagctggcgctgccgagcaagtacgtgaacttcctctacctggcgtcccactacgagaagctcaagggcagtccagaggataacgagcagaagcagctattcgtggagcagcacaagcactacctggacgagatcatcgagcagatcagcgagttctccaagcgcgtcatcctggcggacgccaacctggacaaggtgctgtccgcgtacaacaagcaccgcgacaagccgatccgcgagcaagccgagaacatcatccacctgttcaccctcacgaacctcggggcacccgccgccttcaaatatttcgacacgaccatcgaccgcaagcgctacaccagcacgaaggaggtgctcgacgccaccctgatccaccagagcatcaccgggctgtacgagacccgcatcgacctctcgcagctcggcggggac

SEQ ID NO: 74 - DNA, 4101 bp, Artificial sequence
  Synthetic polynucleotide
gacaagaagtacagtattggattggccatcgggacgaacagcgtgggctgggccgtcatcaccgacgagtacaaggtgccatccaagaagtttaaggttctggggaataccgaccgccactcgatcaagaaaaatctcatcggggcgctgcttttcgacagcggcgagacggcggaagcgacgcggctcaagcggacggctcgtcgccgttacacccggcgtaagaaccgcatctgttacctccaggagatattcagcaacgagatggcgaaggtggacgactcctttttccaccgtcttgaggagtccttcctggtcgaggaggacaagaagcacgagcgccacccgatcttcgggaacatcgtggacgaggtggcctaccacgagaagtaccccacgatctaccacctccgcaaaaaactcgtggactcaactgacaaggccgatttgaggcttatctacctcgccctcgcccacatgattaagttccgtgggcacttcctaatcgagggtgacctcaaccccgacaactctgacgtggacaagctgttcatccagcttgtgcagacctacaatcagctctttgaggagaatccgatcaacgcatctggtgtggacgcaaaggccatcctcagcgcgcggctgagcaagtctaggcggttggagaacctgatcgcccaactgcccggcgagaagaaaaatggcctcttcggcaacctgatcgccctgtcgctggggctcacgccgaacttcaagagtaactttgacctggcggaggacgctaagctccagctatctaaggacacatacgacgacgacctggacaacctgctggcccagatcggcgaccagtacgccgacctcttcctagccgccaagaacctgtccgacgccatcctcctcagcgacatcctgcgcgtgaacacggagatcacgaaggctccgctcagcgcctccatgattaagcggtacgacgagcaccaccaagacctaactttactcaaagccctcgtgcggcagcagcttcccgagaagtacaaagagatattttttgatcagtccaagaacggttatgcgggctacatcgacggcggcgcgagccaggaggagttctacaagttcatcaagcccatcctggagaagatggacggcacggaggagctgctcgtgaagctcaaccgtgaagacctcctgcgaaagcagcgaaccttcgacaacggttcgatcccgcaccagatccacctcggggagctgcacgccatcctgaggcgacaggaggacttctaccctttcctaaaggacaaccgcgagaagattgaaaaaatcctgacgtttcgcataccctactacgtcggcccgctggcgcgcggcaactcccggttcgcctggatgacccgtaagagcgaggagacgatcaccccgtggaacttcgaggaggtcgtggacaagggcgcgagcgcgcagagcttcatcgagcgcatgaccaacttcgacaagaacctcccgaacgagaaggtgctcccaaagcactccctcctgtacgagtatttcaccgtgtacaacgagttgacaaaggtgaagtacgtgacggagggaatgcggaagcctgcgttcctctcgggcgagcagaagaaggcaatcgtggacctgctcttcaagaccaaccggaaggtgacggtgaagcagctcaaggaggactacttcaaaaaaatcgagtgcttcgactccgtggagataagcggcgtggaggaccgattcaacgcctccctcggcacctaccacgacctccttaagatcatcaaggacaaggacttcctggacaacgaggagaacgaggacatcctggaggacatcgtgctcaccctgaccctcttcgaggaccgggagatgatcgaggagcgcctcaagacgtacgcccacttgttcgacgacaaggtgatgaagcagctcaagcggcggcgatacaccgggtggggccgcctatcccgcaaacttatcaacggcatccgcgacaagcagtccggcaagacgatcctggatttcctcaagtcggacgggttcgccaaccggaacttcatgcagctcatccacgacgacagcctcacgttcaaggaggacatccagaaggcccaagtgagcggtcaaggggacagcctccacgagcacattgcgaaccttgctgggagccctgcgatcaagaaggggatattgcaaaccgtgaaggtcgtggacgagttggtgaaggtcatggggcgacacaagcccgagaacatcgtgatcgagatggccagggaaaatcagaccacgcagaagggccaaaaaaacagccgcgagcggatgaagcggatcgaggagggcatcaaggagctggggtcgcagatcctcaaggagcacccggtggagaacacgcagctccagaacgagaagctgtacctctattacctacagaacgggcgggatatgtacgtggaccaggagctagacatcaaccgcctgtccgactacgacgtggaccatatcgtcccgcagtcgttcttgaaggacgacagcatcgacaacaaggtgctcacaagatcggataagaatcgaggcaagtccgacaacgtgccctcggaggaggtggtcaagaaaatgaaaaactactggcggcagttgctgaacgccaagctcattacgcagcggaagttcgacaacctgacgaaggctgaacgtggtgggctcagcgagctagacaaggcggggttcatcaagcggcagctcgtcgagacccggcagatcaccaagcacgtggcgcagatcctggactcgcgcatgaacaccaagtacgacgagaacgacaagctcatccgtgaggtgaaggtcatcacccttaagtctaagctggtcagtgacttccgcaaggacttccagttctacaaggtccgggagatcaacaactaccaccacgcgcacgacgcctacctcaacgcggtggtggggacggcgcttattaagaaatatcccaagctggaaagcgagttcgtttacggcgactacaaggtgtacgacgtccgcaagatgatcgcaaagtcggaacaggaaatcggaaaggcgacggccaaatatttcttttactccaacatcatgaatttttttaagacggagatcaccctggcgaacggggagatccgcaagcggcccctcatcgagaccaacggggagacgggcgagatcgtctgggacaagggccgggacttcgccaccgtgcggaaggtgctttctatgcctcaagtcaatatcgtcaaaaagacagaggtgcagaccggcgggttcagcaaggagtctatcctgccgaagcgcaactcggacaagctcatcgcgcgcaagaaagactgggaccccaaaaaatatggcgggttcgactcgccgaccgtcgcctacagcgtcctcgtggtggctaaggtcgagaagggcaagagcaaaaagctaaagtcggtgaaggagctgctgggcatcaccatcatggagcgctcgtctttcgagaagaatccaatcgacttcctagaggcgaaggggtacaaggaggtcaaaaaggatcttatcatcaaactgccgaagtacagtctgttcgagctggagaacgggcggaagcggatgctggctagtgcgggcgagttgcagaagggcaacgagttggcactgccctccaagtacgtgaacttcctgtacctggcctcccactacgagaagctcaaggggagccccgaggacaacgagcagaagcagctattcgtcgagcagcacaagcactacctggacgagatcatcgagcagatcagtgagttctccaagcgggtcatcctcgcggacgccaacctggacaaggtgctgagcgcgtacaacaagcacagggacaagccaatcagggaacaggccgagaacatcatccacctgttcaccctgaccaacctgggtgcaccggctgccttcaagtactttgacacgaccatcgaccggaagcgctacacctccacgaaggaggtgctggacgccacgctgatccaccagagcatcaccgggctctacgagacacggatcgacctgagccagcttggcggggac

SEQ ID NO: 75 - DNA, 4092 bp, Artificial sequence
  Synthetic polynucleotide
gacaaaaagtattccattggactcgctatcggcacgaacagcgtcgggtgggcggtcatcactgacgagtacaaggtgccgagcaagaagtttaaggtgctgggaaacaccgacaggcactcgatcaagaaaaatcttatcggggccctactcttcgactccggagaaaccgccgaggccacccggttgaagcgcacggcccgccgtcgctacaccaggcgcaagaaccggatctgctacctccaggagatattcagcaatgagatggcgaaggtggacgactcgttttttcacaggctagaggagtctttcctcgtggaggaggacaagaaacacgagcgccaccccatcttcggcaacatcgtggatgaggtggcatatcacgagaagtacccaaccatctaccacctccgcaaaaagctcgtggactctaccgacaaggccgacctccgtctgatctacctcgcgctggcccacatgattaagttccgaggacactttctgatcgagggcgacctgaacccagacaacagcgacgtggacaagctgttcatccaacttgtccagacctacaatcagctcttcgaggagaaccctatcaacgcctcgggcgtggacgcgaaggccatcctgtccgcccgcctgagcaagtcgcggcggctggagaacctgatcgcccagctccccggcgaaaaaaagaacggcctcttcggcaacctcatcgcgttgtcgctggggctcaccccgaacttcaagtccaacttcgacctggccgaggacgctaaactccagctctcgaaggatacctacgacgacgacctcgacaacctgctggcccagatcggcgaccagtacgcggaccttttcctggcggccaagaacctgagcgacgcgatcctccttagcgacatactccgtgtgaacaccgagatcacgaaggccccgctctccgcgtccatgattaagcgctacgacgagcaccaccaagaccttaccctgcttaaggcgctggtcaggcagcagttaccggagaagtacaaggagatcttttttgatcaatctaagaacggttacgccgggtacatcgacggcggcgcgtcccaggaggagttctacaagttcatcaagccgatcttggagaaaatggacgggaccgaggagctgctcgtgaagctcaaccgcgaagacctcctccgcaagcagcgcaccttcgacaacgggagcatcccgcaccagatccacctgggagagctgcacgcgatcctgcggagacaagaggacttctaccccttcctcaaggacaaccgggagaagattgaaaaaatacttacttttcgtatcccgtactacgtcgggccccttgcgaggggcaactccagattcgcgtggatgacccgcaagtccgaggagaccatcaccccgtggaacttcgaggaggtggtggacaagggcgcgtcggcccagtcgttcatcgagcgcatgaccaacttcgacaagaaccttccgaacgagaaggtgctcccgaagcacagcctgctctacgaatattttactgtgtacaacgagctgacgaaggtcaagtacgttacggaggggatgaggaagcccgccttcctctccggcgagcagaagaaagccattgtggatctcctgttcaagaccaaccgcaaggtgacggtgaaacagctcaaagaggactacttcaagaagatcgagtgcttcgactccgtagagatcagcggggtcgaggaccgcttcaacgcctcgctgggcacgtaccacgacctgctaaagattatcaaggacaaagacttcctagacaatgaggagaacgaggacattctggaggacatcgtgctgactctgacgctgttcgaagaccgcgagatgatcgaggagcggcttaagacgtacgcccacctgttcgacgacaaggtgatgaagcagttgaaacggcggcgctacaccgggtggggccgcctctcccgcaagctcatcaacggcatccgcgacaagcagtcggggaagacgatcctggacttcctcaagagcgacggcttcgccaaccgaaacttcatgcagctaatccacgacgacagcctgacgttcaaggaggacatccagaaggcccaagtgagcggccagggagactcgctacacgagcatatcgccaacctggctggcagcccggcgattaagaaaggaatcctccaaaccgtcaaagtggtggacgagctggtgaaggtgatgggccgccacaagcccgagaacattgtgatcgagatggcgcgggagaaccagacgacgcagaagggccaaaaaaatagcagggaaaggatgaagcgaatagaggaggggatcaaggagctggggagccagattctcaaagagcacccggtcgagaacacacagctccagaacgagaagctgtacctctactacctccaaaacggccgcgatatgtacgtggaccaggaactagacatcaaccggctgagcgactatgacgtggaccacatcgtgccgcagtccttcctcaaggacgactcgattgacaacaaagtgctcactagatccgacaagaacagaggcaagagcgataacgtcccgtcggaggaggtcgtcaagaaaatgaaaaactactggcggcagctcctaaacgccaagctcatcacgcagcgtaagttcgacaacctgacgaaggcggagcggggcgggctgagcgagctggacaaagcggggttcatcaagcggcagctcgttgagacgcggcagatcacaaagcacgtcgcgcaaatcctcgactcccgcatgaacaccaagtacgacgagaacgacaagctcatccgggaggtgaaggtcattacccttaaatcgaagctcgtcagcgactttcgtaaggacttccagttctacaaggtcagagagatcaacaactaccaccacgcccacgacgcctatctgaacgccgtggtgggcaccgcgcttattaagaagtaccccaagctggagtccgagttcgtgtacggcgactacaaggtttatgacgtcaggaagatgatcgccaagtcggaacaggagatcggaaaagctaccgccaaatatttcttctatagcaacatcatgaacttcttcaaaaccgagatcaccctcgccaacggcgagatccggaagcgcccgctcatcgagaccaacggggagaccggggagatcgtctgggacaaggggcgggacttcgctactgtccgaaaggtgctctccatgccacaagtgaatatcgtcaagaaaacagaggtgcagaccggagggttcagtaaggagtccatcctgcccaagcggaactccgacaagctaattgctcgcaaaaaggattgggatcctaaaaaatatggcggcttcgactcgcccacggtcgcctactctgtgctggtcgtggcgaaggtggagaagggcaagtccaagaagctcaagagcgtcaaggagctgctggggatcacgatcatggagcgtagttcgtttgagaagaatcccatcgacttcctggaggctaagggctacaaggaggtcaaaaaggacctcatcattaagctgccgaagtacagcctcttcgagctggagaacgggcggaagcgtatgctcgcctccgctggggagttacaaaaggggaacgagctggcgctgccgtctaagtacgtcaacttcctgtacctggcctcccactacgagaagctcaaggggtcgccggaggacaacgagcagaagcagctcttcgtagagcagcacaagcactacctggacgagatcatcgagcagatttcagagttctcaaagcgggtcatcctcgccgacgccaacctggacaaggtgctctcggcctacaacaagcaccgggacaagccgatccgcgaacaggccgaaaacatcatccacctgttcacgctcaccaacctcggtgccccggcggccttcaagtactttgacacgaccatcgaccggaagcgctatacctcgacgaaggaggtgctggacgccaccctgatccaccagtccatcaccgggctttacgagacccggatcgacctctcgcagcta

SEQ ID NO: 76 - DNA, 4101 bp, Artificial sequence
  Synthetic polynucleotide
gacaagaagtatagtattggactcgccatcggaaccaactctgtggggtgggctgttattacagatgaatataaggtgccatccaaaaagtttaaagttctgggcaatactgatagacactcaatcaagaagaatctgataggtgcacttctgtttgatagtggagagactgccgaggcaaccagacttaaaaggactgcaagaagaagatataccagaagaaagaataggatttgctatttgcaggaaatcttcagcaacgaaatggccaaggttgatgactcatttttccataggttggaggagagttttcttgtggaggaagataagaagcacgaaagacacccaattttcgggaatatagtggacgaggtggcttatcatgagaagtatcccactatctaccacctgagaaagaaacttgtggactcaaccgataaggctgatcttaggcttatatacttggcccttgcacatatgatcaaattcaggggccattttcttatcgaaggcgatcttaatcccgataactcagatgtggacaagctgtttatacaacttgtgcaaacctacaatcaactcttcgaggagaatcccattaacgcctccggcgtggatgcaaaagccatactgtcagccagactgagcaaaagtaggagactggagaatcttatagcccaactgcccggtgaaaagaagaatgggctcttcggaaatctgatcgctctttcattggggttgacacccaactttaagagtaactttgacttggcagaagatgcaaagttgcagctcagtaaagacacatatgacgatgaccttgacaatctcttggcacaaataggggatcaatacgctgaccttttcctcgctgccaagaacctcagcgacgctatactgttgtccgacattcttagggttaataccgaaattacaaaggcccctcttagtgcaagtatgatcaaaaggtatgatgagcatcaccaagaccttacactgctgaaggctctggttagacagcaactccctgaaaagtataaggaaatattcttcgaccaaagtaagaacgggtacgccggttatattgatgggggcgcaagtcaagaagaattttacaaattcatcaagccaattcttgaaaagatggacgggactgaggaattgctggtgaaactgaatagagaggaccttcttagaaaacagaggacatttgacaatgggtccatcccacaccagattcatctgggggaactccacgcaatattgaggagacaagaagacttttacccattccttaaggataatagagagaaaatcgaaaaaatcctgactttcaggattccttactatgttgggccactggccagggggaactcaagattcgcttggatgacaaggaagtcagaagaaaccataaccccttggaattttgaagaggtggttgataagggggcatcagcccagtctttcatagagaggatgaccaactttgataaaaatcttccaaatgagaaggttttgccaaaacatagtcttttgtacgagtactttactgtttataacgaattgaccaaggtgaagtatgtgaccgagggaatgaggaagccagcatttttgtccggggagcaaaagaaagcaatcgttgatcttctcttcaagaccaacagaaaagtgaccgtgaaacaactgaaggaagactacttcaaaaagatagaatgtttcgattcagtggaaattagcggtgttgaagacaggttcaatgcttcattgggtacttaccacgacctgttgaagataatcaaagacaaggactttctcgataatgaggagaacgaagacatcttggaagacattgtgcttacactcactttgtttgaggacagggaaatgattgaggaaagactcaaaacttacgctcatttgtttgatgataaggttatgaaacaactaaaaagaagaaggtacaccggctggggaagattgagtaggaaactgatcaacggtattagagataaacaatccggaaagactatcctcgatttccttaagagtgatggctttgcaaataggaattttatgcagctgattcatgacgactcacttaccttcaaagaagacatccaaaaagctcaggtgtctgggcaaggcgacagtctgcatgaacatatagctaacttggctgggagtcccgccatcaagaaggggatacttcaaacagttaaagttgtggacgaattggtgaaggtaatgggaaggcacaagcctgaaaatatagtgatagaaatggcaagggaaaatcaaacaacccagaagggacagaagaacagtagggaaaggatgaaaaggatagaagaggggatcaaagagcttggtagccagatcctcaaggaacatccagtggagaatacccaacttcaaaacgagaaactctatttgtactacttgcagaacggaagagatatgtatgtggaccaagagcttgatattaacaggctgagcgattatgacgttgaccacatagtgccccaatcattcctcaaggatgactctattgataataaggtgctgacaaggagtgacaagaatagagggaaatccgacaacgttccatccgaggaagttgtgaagaagatgaagaactactggaggcagttgctgaacgctaagctcattacccagaggaaattcgataacctgaccaaagcagagagaggcgggctgagcgaactcgataaagcaggtttcatcaagagacaactcgtggagactaggcaaattactaagcacgtggctcaaatactcgacagcaggatgaacacaaagtacgacgagaacgacaagctcattagagaggttaaggttattactctgaaaagtaaattggttagcgatttcagaaaggatttccaattctataaggttagagagatcaacaattatcatcatgcacatgatgcctatctgaatgctgtggttggtacagcccttatcaagaagtaccctaagctagagagcgagtttgtgtacggagattataaggtgtatgatgtgaggaaaatgatcgctaaaagtgagcaagagattggaaaggctaccgccaaatacttcttttattccaatattatgaatttcttcaagacagaaatcaccctggctaacggcgagataaggaagaggccgcttatcgaaactaatggggagacaggcgaaatagtgtgggacaaagggagggatttcgcaactgtgaggaaggttttgagcatgcctcaggtgaatatcgttaagaaaaccgaagttcaaactggagggttctctaaggaaagcattctccccaagaggaactccgacaagctgattgctagaaagaaagactgggaccccaagaagtatggcggattcgactcacccactgtggcatatagcgttctcgtggtggcaaaggttgaaaagggtaaatccaaaaaactcaaatccgtgaaggaactccttggcataactattatggaaaggagtagctttgaaaagaatcccatcgactttctcgaagctaagggctataaggaagttaagaaggaccttataatcaaacttccaaaatactccctttttgagttggaaaacggcagaaagagaatgttggccagtgccggggagcttcaaaagggcaacgaactggctctgcctagcaaatatgtgaactttttgtatctggcatcacactacgagaaacttaaaggctctcctgaggacaacgagcaaaaacagctctttgttgaacagcataagcactacctcgacgagattattgagcagatcagcgagttctcaaagagagttattctggctgacgctaatcttgacaaggttttgtccgcttacaacaaacacagggataagccaatcagggagcaggcagaaaacataatccatctctttaccctgacaaacctcggtgcccccgctgctttcaagtattttgatactaccattgacaggaagagatatacttccactaaggaagtgctcgacgcaaccctcatacaccaaagtatcacaggcctctatgaaactaggatagatttgtctcaacttgggggcgat

SEQ ID NO: 77 - DNA, 4101 bp, Artificial sequence
  Synthetic polynucleotide
gacaaaaagtattccatcgggcttgctatcggaaccaactctgtggggtgggcagttattaccgacgaatacaaggtgcccagcaagaagtttaaggttctggggaacacagatagacatagcataaagaaaaacctgataggcgcactgttgttcgactccggggaaacagccgaagctaccaggctgaagagaactgcaagaagaaggtacaccagaagaaaaaacagaatatgttatctccaagagattttctctaacgagatggccaaggtggacgactcattctttcacagactggaagaatctttccttgtggaagaagataagaaacacgagaggcaccctatttttggcaatatcgtggatgaggtggcttaccacgaaaaataccctacaatataccacctcaggaaaaaattggttgatagtacagacaaggccgacctcaggctcatctatttggccctggcccatatgattaaattcagggggcactttctcatcgagggagatttgaaccccgacaacagtgatgttgataagctctttattcagctcgtgcagacttacaatcagttgtttgaggaaaaccccattaatgcttccggggtggacgccaaggcaatcctttctgcaagactctcaaagtcaaggagactcgaaaatctgatagcacagcttccaggagagaagaagaacgggctctttggaaacctgatcgctctgtcactcggactcacacccaatttcaaaagcaattttgatttggcagaggacgctaagctgcaactcagtaaggatacctacgacgatgacttggataatctgctcgcacaaattggggaccagtatgcagacctgtttctcgcagctaagaacttgagtgacgccatattgctcagtgacatcctcagggttaataccgagattacaaaagctccactctctgcaagcatgatcaagaggtatgacgagcaccatcaagacctgacactccttaaggcgttggttaggcagcaacttcctgaaaagtataaggaaatcttcttcgatcaaagcaaaaacggctacgccggctatatagacgggggagcatcccaagaagaattttataagttcataaaacctatattggagaagatggacgggacagaggaattgctcgtgaaactgaacagggaggatctcctcaggaagcaaaggaccttcgacaatggctccatcccacatcagattcacctcggcgaactgcacgcaatactgagaagacaagaggacttttatcctttcctgaaggacaacagggagaaaatcgagaaaatcttgacattcagaatcccatactacgttgggcctctggccagaggtaacagtaggttcgcctggatgactaggaaatcagaggagactattacaccctggaactttgaagaagttgttgataagggagcttcagcacaatcattcatcgaaagaatgacaaactttgacaaaaatctgcctaatgagaaagtgctcccaaaacattccctgctgtatgagtattttaccgtttataacgagcttaccaaggtgaaatacgttactgaaggtatgagaaagccagcttttctttcaggggagcaaaagaaggctatcgtggatcttctctttaagaccaacagaaaggttaccgtgaagcagcttaaggaagactactttaaaaagatcgagtgttttgactcagtggaaataagcggtgttgaagatagattcaacgcatccttgggaacttatcatgatcttcttaagataatcaaggataaagactttctcgacaacgaggaaaacgaagatatactggaggacatagttctgacacttactttgttcgaggatagggagatgatcgaggaaagactgaaaacatatgctcaccttttcgacgacaaagttatgaaacaactcaagagaaggagatatacagggtgggggagattgagcaggaaactgattaatggtatcagagacaaacagtcaggaaaaacaatactcgactttttgaaatcagacgggttcgcaaataggaatttcatgcagcttatacacgacgattcacttacttttaaagaggacattcaaaaggctcaagttagtggacaaggtgactccctccacgaacacatcgcaaatctcgctggcagccctgcaattaagaagggtatactccagacagttaaggttgttgacgagctggttaaagtgatgggaagacacaaacccgagaacatagtgatagagatggccagggaaaaccaaaccactcaaaaagggcagaaaaattccagagagaggatgaaaaggattgaagaaggtatcaaggagctgggtagccaaattctgaaagaacatcctgtggaaaacactcaactccagaatgagaaactctatctgtactatctgcaaaatgggagagatatgtatgtggaccaggaactggacataaacaggctctcagattacgatgtggatcatatcgtgccacagtcctttcttaaggatgatagcatcgacaataaggtgcttaccaggtccgacaagaacaggggaaagtcagataacgtgccttctgaagaagttgttaaaaagatgaagaactactggagacagctgcttaacgctaagctcataacacagaggaagtttgacaacttgaccaaggccgagagaggcggactctcagaattggataaggcagggttcataaaaaggcagctggtggaaacaaggcagataactaaacatgtggctcagatcctcgatagtaggatgaatacaaaatacgatgagaacgacaagctcataagggaggttaaagtgataactctgaaatccaaactggttagcgattttaggaaggatttccagttttacaaagttagggagatcaacaattatcatcacgcccacgatgcctacttgaacgcagttgtgggtactgcacttatcaaaaagtaccctaagctggaatccgagtttgtttatggagactataaggtgtacgacgttagaaaaatgattgcaaagtcagagcaggagatagggaaagccactgcaaaatatttcttttatagcaatatcatgaatttctttaagacagaaatcacactggccaatggggaaataaggaagaggcccctgatcgaaactaatggcgagacaggggagattgtgtgggataaaggtagggactttgcaacagtgaggaaagtgctgagcatgccccaagttaatatcgttaaaaagaccgaggttcaaacagggggctttagtaaggaaagcattttgcccaagaggaatagtgacaaattgattgctaggaaaaaagattgggaccccaaaaagtatggcggatttgatagccccactgttgcttactccgtgctcgtggttgcaaaggtggagaagggaaagagcaagaaactgaagtcagttaaggaactccttggtatcactatcatggaaagaagctcctttgagaagaaccctattgacttcctggaggctaaagggtacaaagaggttaagaaagaccttatcattaaattgcccaaatatagtcttttcgagcttgaaaacggaagaaagaggatgcttgcatccgctggcgaattgcaaaagggcaatgagcttgctctcccttccaagtatgtgaacttcctttatcttgcctcacactatgaaaaactcaaaggttcacccgaagacaacgaacaaaagcaactatttgtggaacaacacaagcactacctggacgaaatcattgagcaaatttctgagttttcaaaaagggtaatcttggctgacgcaaatctcgacaaagttttgtcagcttacaacaaacatagagataagccaattagagagcaagctgagaatatcatccatctgtttaccctgactaaccttggagcgcctgctgcttttaaatatttcgacaccacaatcgacaggaagaggtacactagcactaaggaagttctcgacgccaccctcatccaccagagtattacaggcctgtacgagacaagaattgatctttctcaacttggtggtgac

SEQ ID NO: 78 - DNA, 4101 bp, Artificial sequence
  Synthetic polynucleotide
gataagaagtactcaatcggtctggcaatcggaaccaactctgtgggttgggcagtgattacagatgagtataaggtgccaagcaaaaaattcaaggtgctgggtaataccgacagacacagcattaagaagaatttgattggagcactcctctttgactcaggggaaacagcagaggcaacaaggctgaagaggacagcaaggcggaggtacacaaggcggaaaaacaggatatgctacctccaggaaatctttagcaacgagatggctaaagtggatgatagctttttccatagactcgaagaatcctttcttgttgaagaggacaaaaagcatgaaaggcatcccatcttcggcaatatagttgatgaggttgcataccatgagaagtaccccacaatctaccacctcagaaagaaacttgtggactccacagataaagcagacctgaggctcatatacctcgcactcgcacacatgatcaagttcagagggcactttctcatcgaaggtgacctgaatccagataattcagatgtggataaactgtttatacagctggtgcaaacatacaaccaacttttcgaggaaaacccaatcaatgcctccggtgttgatgcaaaggccatcctgtcagcaagactcagcaaaagcaggcggctcgaaaacctcatcgcccagcttcccggtgaaaagaagaacgggctctttggtaatctcatcgcattgagccttggtcttactccaaacttcaagagcaattttgatctggcagaggatgctaaactgcaactctcaaaggacacatatgacgatgaccttgacaatctgttggcccagatcggggaccaatatgcagacctcttcctggccgcaaagaatctgtcagatgcaatcctcttgtccgacatactgagagttaacactgagatcacaaaggcacctctgtccgcctccatgattaagagatacgatgagcatcaccaggatctgactttgctcaaagccctcgttagacagcagttgccagaaaagtacaaagaaatattctttgatcaatcaaaaaacggatatgcagggtacatcgacggtggggcaagccaggaagagttctacaaattcatcaaacctatcctggaaaagatggatgggacagaagagctgctggttaagctgaatagggaagacctcctcagaaagcagaggacatttgataacgggagcatccctcatcaaatccacctcggtgaactccatgctatcctgagaaggcaggaagacttttatccatttttgaaggacaatagggagaaaatcgaaaaaatcctgacattcagaatcccatactacgttggtcctctggcaagaggtaacagtaggttcgcatggatgacaaggaaaagcgaggagacaatcacaccctggaattttgaggaagttgttgacaagggtgccagcgcacaatcctttatcgaaagaatgacaaatttcgacaagaatctgcctaacgaaaaggttctcccaaagcattcactcctgtacgaatattttacagtttataacgaactgactaaagttaaatacgttaccgagggtatgaggaagccagcattcctttccggggaacagaagaaagctattgtggacctcctgttcaagacaaatagaaaagtgacagttaagcaactcaaagaggattacttcaaaaagatcgaatgttttgactctgtggagatcagcggggtggaggatagattcaacgccagcctgggtacatatcatgatctcctgaaaatcattaaagacaaggacttccttgacaacgaggagaacgaggacattctggaagacattgttctgaccctcacactctttgaggatagggagatgattgaggaaagactgaagacctacgcccacctctttgacgataaagtgatgaaacagctcaagagaagaaggtatacaggttgggggagactgagcaggaagttgatcaatgggattagggacaaacagtccgggaaaacaatcctcgattttctgaagtcagacggtttcgcaaacagaaattttatgcagctcattcacgatgacagcttgacattcaaggaagacatccaaaaggctcaagtgagcggccaaggggatagcctccacgagcatattgcaaatctggcaggttcaccagccatcaaaaagggcatacttcagacagttaaggttgtggacgaattggttaaagttatgggcaggcataagccagagaatatcgttatcgaaatggcaagggagaaccaaacaactcaaaaagggcagaaaaatagcagagagaggatgaaaagaatcgaggaagggatcaaggaacttgggtcccaaatcctcaaggagcacccagttgaaaatactcaactgcaaaacgagaagctctatctctactatctccaaaacgggagggatatgtatgttgaccaggagctggatattaacagactgtcagattatgatgttgatcatatcgtgccccagtcattcctgaaggacgattccatcgacaacaaagttctcacaaggtccgataaaaacaggggcaagtccgataacgttccaagcgaagaagtggtgaaaaagatgaaaaactattggagacaacttctgaatgcaaagttgattactcagagaaagtttgacaacctcacaaaagcagaaagaggcgggcttagcgaactcgataaggcagggtttatcaaaagacagctggttgagacaaggcagatcacaaaacatgtggcacagatccttgactcaaggatgaataccaagtatgatgagaatgataagttgatcagggaggttaaagttatcacactcaaatccaaactggtgtcagacttcaggaaagactttcaattttataaggtgagggagatcaataactaccaccatgcacatgacgcctacctgaacgcagtggtgggtacagcattgattaaaaaataccctaagctggagtctgagtttgtgtacggggactacaaggtgtacgacgtgaggaaaatgatagccaagtccgagcaggagatcgggaaagcaacagctaagtatttcttttacagtaatatcatgaatttctttaaaactgagattactctggcaaacggggagatcaggaaaagacccctcatcgagactaatggtgaaacaggtgagatcgtttgggacaaggggagggattttgctactgttagaaaagttctgagtatgccacaagtgaatattgtgaaaaagacagaagttcagacaggtgggttctccaaagaatccatcctgcccaagagaaattcagacaagctcatcgcaagaaagaaggactgggaccctaagaagtacggaggatttgacagccccaccgtggcctattccgtgcttgttgtggcaaaggtggagaaagggaagagcaaaaaactgaaatccgtgaaagaactgctgggaattaccatcatggaaagaagctcctttgagaagaacccaatcgacttcctggaagcaaaaggatataaggaagtgaaaaaggacctcattatcaagctcccaaaatactcacttttcgagttggagaacggtagaaagaggatgctggcaagcgcaggggaacttcagaaaggcaatgagctggcattgccatcaaagtatgtgaacttcctctacttggccagccattacgagaaacttaaaggtagcccagaagataacgagcaaaaacagctctttgtggaacagcataagcattatctggatgagatcatagaacaaatctcagagttttccaagagagttatcctcgcagatgcaaacctggataaggttctctcagcctataataagcatagagacaagccaattagagagcaagcagagaacattatccacttgttcactcttacaaacctgggggcaccagccgccttcaaatatttcgatacaacaatagacagaaagaggtataccagcaccaaagaagttctcgacgccacactgatccatcaatcaatcacaggcctttacgaaactaggatcgacttgtcacaactgggtggggat

SEQ ID NO: 79 - DNA, 3307 bp, Artificial sequence
  Synthetic polynucleotide
gagcaaggacacctacgacgacgacttggacaacctattggcccagataggtgaccagtatgcagacctcttccttgcggccaagaacttgagtgacgctatactgctcagtgacatcctgagggtgaacactgagatcactaaggcccctctctctgcctcaatgattaagcgttacgacgagcatcaccaggatctcaccctgcttaaggcccttgttcggcagcagctccctgagaagtacaaggagatattttttgaccagtctaagaacggctacgccggttacattgacggtggggcaagccaggaggagttctacaagttcatcaagccgatccttgagaagatggacggcaccgaggagctacttgtcaagttgaaccgggaagacctgctccggaaacagcgtacattcgacaacggcagcatccctcaccagatccacctgggcgaactacacgccatcctccgacgtcaggaggacttctatccattcttgaaagataacagggaaaaaatcgaaaaaatacttacgtttcgaataccttactacgtggggccccttgctcggggaaactccagattcgcatggatgaccaggaagtcagaggagaccatcacaccctggaactttgaggaggtggttgacaaaggtgcttctgcccagtccttcattgagcggatgactaacttcgacaagaacctgcccaacgagaaggtgctgccaaagcacagcctgctctacgaatactttactgtgtacaatgagctgacgaaggtgaagtacgtgacagaggggatgcggaagcccgctttcctgagcggcgagcaaaaaaaagcaatcgtggacctactgttcaagaccaaccgaaaggtgacagtgaagcagctcaaggaggactacttcaaaaaaatcgagtgcttcgactctgttgagataagcggcgtggaggaccgattcaacgcctcattgggaacctatcacgacctgctcaagatcattaaggacaaggacttcctggataatgaggagaatgaggacatcctggaggatattgtgctgacccttactctattcgaggacagggagatgatcgaggagcgactcaagacctacgctcacctgttcgacgacaaggttatgaagcaattgaagcgtaggcgatacacggggtggggaagactctcccgaaaactgataaacggcatcagggacaagcagtcagggaagacgatcttggacttcctgaaatccgacgggttcgccaaccgcaacttcatgcagctcattcacgacgactcactaacgttcaaagaggacattcagaaggctcaagtcagtggacaaggcgactccctgcacgagcacattgcaaaccttgcgggctccccggcgattaaaaagggcattctccaaacggttaaggtggtggacgagctggtgaaggtgatgggccgacacaagcctgagaacatcgtgatcgagatggccagggagaaccagactacccagaagggtcagaagaactctcgggaacgtatgaagcgtattgaggaggggattaaggagttgggctctcaaatcctcaaggagcaccctgtggagaacactcagctccaaaacgagaagctgtacctgtactacctgcaaaacgggcgcgatatgtacgtggatcaggagttggacatcaacaggcttagcgattacgacgtggaccacatcgtgccacagtcattcttaaaggacgacagcatcgacaacaaggttctgacgaggagcgacaagaatcgagggaaaagtgacaatgttccatccgaggaggtggtcaagaaaatgaagaactattggcgtcagcttctgaacgccaagctcatcacccagcggaaattcgacaacctgactaaggctgagcgaggcggactctccgagcttgacaaggctggcttcatcaagcggcagttggtcgaaacccgacagataacgaagcacgttgcccagatacttgactcccgtatgaacaccaagtacgacgagaacgacaagctcatcagggaggtgaaggtcattacccttaagtccaaactcgtcagcgactttcgtaaggacttccagttctacaaggtgcgcgagatcaataactaccaccacgcacacgacgcctacctgaacgcagtggttggaaccgcgttgattaaaaagtaccccaagttggagtcggagttcgtttacggggactacaaggtgtacgacgttcggaagatgatcgccaagtctgaacaggagatcgggaaagcaaccgccaagtatttcttctatagcaacatcatgaacttctttaaaaccgagatcacacttgccaatggcgagatccgtaagaggccgctgatcgagacaaatggggagactggcgagatcgtgtgggacaagggccgcgacttcgcaaccgttcggaaagtcttgtccatgcctcaagtcaacatcgtcaagaagactgaggtgcaaacaggcgggttctcgaaggagtccatactgcccaagaggaactcagacaagctcatagcacgcaaaaaagactgggatccaaagaaatacggcgggttcgactcgccgacagtcgcatactccgtgttagtggtggctaaagtggaaaaggggaagtccaagaagctcaagtccgtcaaggagttgctcgggatcaccattatggaacggtcctcattcgagaagaatcccattgacttcctagaggcgaagggctacaaagaggtcaaaaaggacctaattattaagctccccaagtattcactcttcgaacttgaaaatggtcgtaagcggatgttggcaagcgctggagagcttcagaaggggaacgagcttgcactgccttccaagtacgtgaacttcctgtacctcgcctctcattacgagaagttgaagggctcaccggaggacaacgagcagaagcagttgttcgtggagcagcacaagcactacctcgacgagatcattgagcagataagtgagttcagcaaacgggtgatccttgccgacgctaacctggacaaggtgctgagcgcctacaacaagcacagagacaagccgatccgagagcaagcggagaacatcatacacctgttcaccctcacgaacctcggggctcccgcagccttcaaatattttgacacgaccatcgaccgtaaacgctacactagcacgaaggaggtgctggacgctacccttatccaccagtccatcaccggcctgtacgagacgagaatcgacttgtcgcagctcggtggtgac

SEQ ID NO: 80 - DNA, 4101 bp, Artificial sequence
  Synthetic polynucleotide
gacaaaaaatactcaattggtctggcaattgggaccaacagtgtcggatgggccgtgattaccgacgagtacaaggtgccgtccaaaaaattcaaggtgcttgggaacaccgaccgccactcgatcaagaaaaacctaatcggtgcgttgcttttcgacagtggggagaccgccgaggcaacacgcttaaaacgcacagctaggaggagatatacacggcgcaagaaccgaatatgctacttacaggagatattctccaatgagatggcgaaggtggacgactctttcttccatcggcttgaggaatccttcctggtcgaggaggacaagaagcacgagcgacacccgatattcgggaacatcgttgatgaggtggcgtaccacgagaagtacccaacgatataccacttacgcaagaagctcgtggactctacggacaaggccgacttgcgccttatctacttggcactggcccacatgattaagttccgaggccacttccttatcgagggtgacctgaaccccgataactccgacgtggacaagctcttcatccaactcgtccagacatacaaccagctattcgaggagaatcctatcaacgcctctggggtggacgctaaagctatcctctcagcccgcctgtcaaagtcgaggaggttggagaacctaatcgcccagcttccaggcgagaagaaaaatgggctgttcggaaaccttatcgcactctcactgggcctaaccccgaacttcaagtccaacttcgacctggcagaggacgcgaaattgcagttgtcgaaagacacctatgacgatgacctggacaacctgttggcccagataggggaccagtacgccgacctgttcctagcggccaagaacctgtccgacgccatcttgctgtcggatatactgcgggtgaacaccgagatcactaaagcacctctctccgccagcatgattaagcgttacgacgagcaccaccaagatttgaccctgctaaaggcacttgtacggcagcagcttcccgagaagtacaaggagatctttttcgaccaaagcaagaacggctacgccgggtacatcgacggaggtgccagccaggaggagttctacaagttcattaagcccatcctggagaagatggacgggactgaggaactacttgtgaagctgaaccgggaagacttactacggaagcagcgtaccttcgacaacggttctatcccacatcagatccatcttggggagttgcacgcgatcctgcgacgccaggaggacttttaccccttcctgaaagacaaccgcgagaaaatcgagaagatactgaccttcagaataccttactacgtcggaccccttgcgcgaggcaactcaagattcgcgtggatgaccaggaaatcagaggagaccatcacaccctggaatttcgaggaggtggttgacaagggtgcctccgcccagtcctttatcgaacgaatgaccaacttcgacaagaacttgcccaacgagaaggtgctccccaaacacagcctcctctacgaatatttcacagtgtacaacgagcttactaaagttaagtatgttactgagggcatgaggaaacccgccttcctgtcaggcgagcagaagaaagctattgtggacctccttttcaagaccaaccggaaggtgacagtgaagcagctcaaggaggactacttcaagaagatagagtgcttcgacagcgtggagatcagcggggtggaggacagattcaatgcctctctcggaacataccacgacttgcttaagatcatcaaggacaaggacttcctcgacaacgaggaaaacgaggatattctggaggatattgttctgactcttaccctgttcgaggaccgggagatgatcgaggagcgtctcaagacctacgcccacctgttcgacgacaaagttatgaagcagctcaagcgtcggagatataccggatggggccgtctgtctcggaagctcatcaacgggatcagggacaagcagtcagggaagacgatcttagacttccttaagtctgacggcttcgccaacaggaacttcatgcagttgatccacgacgacagccttaccttcaaggaggacatccagaaggcccaagtgagtggccagggtgacagcctccacgagcatattgctaatcttgcgggttccccagcgattaaaaagggcatacttcaaaccgttaaggtggtggacgagcttgtcaaggtgatggggcgacacaagcccgagaacatcgtgatcgagatggccagggagaaccagaccacccagaaggggcagaagaatagccgagaacgcatgaagcgcatcgaggaggggattaaggagctagggagccagatcctcaaggaacatcccgtcgagaacacccagctccagaacgagaagctatacctctactacttgcaaaacgggagggatatgtacgtggatcaggagttggacattaaccgcctaagcgactacgacgtagatcacatcgtgcctcagtcattcctcaaagacgacagcattgacaacaaagtcttgacccgatccgacaagaaccgaggaaaatccgacaatgtgccctcagaggaggtcgtcaagaaaatgaagaactattggaggcagctacttaacgccaaactcataacccagcggaagttcgacaacctgacaaaggctgagcggggtgggctcagcgagcttgacaaggctggcttcatcaagcggcagttggtggagacaagacagataacgaagcacgtggctcagatcctggactctcgcatgaacacgaagtacgacgagaacgacaaattgatccgcgaggtcaaggttattacgctcaagagcaaacttgtcagcgatttccgcaaggacttccagttctacaaggtgagggagattaacaactaccaccatgcacatgatgcctacttgaacgcagtggtggggaccgcgcttattaaaaagtaccctaagttggagtcagagttcgtttatggggactacaaggtgtacgacgtccggaagatgattgcaaagtctgaacaggaaatcgggaaggccaccgccaaatatttcttctacagtaacattatgaatttttttaagactgaaattactctcgcaaacggcgagatcaggaagcgtcccctcatcgagacaaacggggagaccggggagatagtctgggacaaggggcgggacttcgctacggtgaggaaggtgctctcgatgccacaagtgaacatcgtcaaaaagacagaggtgcagaccggtggcttctcaaaggagtcaatcctgccaaaacgtaacagcgacaagctcatcgcccgcaagaaagactgggaccctaagaagtatggtgggttcgactcaccgacggtcgcatactccgttctggtcgtggcaaaggtggaaaagggcaagtccaaaaaactgaaatccgtgaaggagttgcttggcattaccatcatggaacgcagcagcttcgagaagaaccccattgacttcctggaggctaaagggtacaaggaggtcaagaaagatttaattattaagctacctaagtacagcttgttcgagctggagaacggccgaaaacgaatgctcgcatccgccggggaacttcaaaagggcaacgagcttgcgctgccctccaagtacgtgaacttcctgtacttggcatcccactacgagaaactcaagggtagcccagaggacaacgagcagaagcagctattcgtggagcagcacaagcactacctcgacgagataatcgagcagatcagtgagttcagtaagcgggtgatactcgcggacgccaacttggacaaggtgcttagtgcctacaacaagcaccgtgacaagcccatccgagaacaggctgagaacatcatccaccttttcactctgacaaacctcggtgctcccgccgccttcaaatacttcgacactaccatcgacaggaagcgctacacatctacgaaggaagttcttgacgctacgcttattcatcagtctatcacagggctgtacgagacaaggatcgaccttagccaactcggcggggat

SEQ ID NO: 81 - protein, 1367 aa, Artificial sequence
  Synthetic polypeptide
DKKYSIGLAIGTNSVGWAVITDEYKVPSKKFKVLGNTDRHSIKKNLIGALLFDSGETAEATRLKRTARRRYTRRKNRICYLQEIFSNEMAKVDDSFFHRLEESFLVEEDKKHERHPIFGNIVDEVAYHEKYPTIYHLRKKLVDSTDKADLRLIYLALAHMIKFRGHFLIEGDLNPDNSDVDKLFIQLVQTYNQLFEENPINASGVDAKAILSARLSKSRRLENLIAQLPGEKKNGLFGNLIALSLGLTPNFKSNFDLAEDAKLQLSKDTYDDDLDNLLAQIGDQYADLFLAAKNLSDAILLSDILRVNTEITKAPLSASMIKRYDEHHQDLTLLKALVRQQLPEKYKEIFFDQSKNGYAGYIDGGASQEEFYKFIKPILEKMDGTEELLVKLNREDLLRKQRTFDNGSIPHQIHLGELHAILRRQEDFYPFLKDNREKIEKILTFRIPYYVGPLARGNSRFAWMTRKSEETITPWNFEEVVDKGASAQSFIERMTNFDKNLPNEKVLPKHSLLYEYFTVYNELTKVKYVTEGMRKPAFLSGEQKKAIVDLLFKTNRKVTVKQLKEDYFKKIECFDSVEISGVEDRFNASLGTYHDLLKIIKDKDFLDNEENEDILEDIVLTLTLFEDREMIEERLKTYAHLFDDKVMKQLKRRRYTGWGRLSRKLINGIRDKQSGKTILDFLKSDGFANRNFMQLIHDDSLTFKEDIQKAQVSGQGDSLHEHIANLAGSPAIKKGILQTVKVVDELVKVMGRHKPENIVIEMARENQTTQKGQKNSRERMKRIEEGIKELGSQILKEHPVENTQLQNEKLYLYYLQNGRDMYVDQELDINRLSDYDVDHIVPQSFLKDDSIDNKVLTRSDKNRGKSDNVPSEEVVKKMKNYWRQLLNAKLITQRKFDNLTKAERGGLSELDKAGFIKRQLVETRQITKHVAQILDSRMNTKYDENDKLIREVKVITLKSKLVSDFRKDFQFYKVREINNYHHAHDAYLNAVVGTALIKKYPKLESEFVYGDYKVYDVRKMIAKSEQEIGKATAKYFFYSNIMNFFKTEITLANGEIRKRPLIETNGETGEIVWDKGRDFATVRKVLSMPQVNIVKKTEVQTGGFSKESILPKRNSDKLIARKKDWDPKKYGGFDSPTVAYSVLVVAKVEKGKSKKLKSVKELLGITIMERSSFEKNPIDFLEAKGYKEVKKDLIIKLPKYSLFELENGRKRMLASAGELQKGNELALPSKYVNFLYLASHYEKLKGSPEDNEQKQLFVEQHKHYLDEIIEQISEFSKRVILADANLDKVLSAYNKHRDKPIREQAENIIHLFTLTNLGAPAAFKYFDTTIDRKRYTSTKEVLDATLIHQSITGLYETRIDLSQLGGD

SEQ ID NO: 82 - protein, 1367 aa, Artificial sequence
  Synthetic polypeptide
DKKYSIGLAIGTNSVGWAVITDEYKVPSKKFKVLGNTDRHSIKKNLIGALLFDSGETAEATRLKRTARRRYTRRKNRICYLQEIFSNEMAKVDDSFFHRLEESFLVEEDKKHERHPIFGNIVDEVAYHEKYPTIYHLRKKLVDSTDKADLRLIYLALAHMIKFRGHFLIEGDLNPDNSDVDKLFIQLVQTYNQLFEENPINASGVDAKAILSARLSKSRRLENLIAQLPGEKKNGLFGNLIALSLGLTPNFKSNFDLAEDAKLQLSKDTYDDDLDNLLAQIGDQYADLFLAAKNLSDAILLSDILRVNTEITKAPLSASMIKRYDEHHQDLTLLKALVRQQLPEKYKEIFFDQSKNGYAGYIDGGASQEEFYKFIKPILEKMDGTEELLVKLNREDLLRKQRTFDNGSIPHQIHLGELHAILRRQEDFYPFLKDNREKIEKILTFRIPYYVGPLARGNSRFAWMTRKSEETITPWNFEEVVDKGASAQSFIERMTNFDKNLPNEKVLPKHSLLYEYFTVYNELTKVKYVTEGMRKPAFLSGEQKKAIVDLLFKTNRKVTVKQLKEDYFKKIECFDSVEISGVEDRFNASLGTYHDLLKIIKDKDFLDNEENEDILEDIVLTLTLFEDREMIEERLKTYAHLFDDKVMKQLKRRRYTGWGRLSRKLINGIRDKQSGKTILDFLKSDGFANRNFMQLIHDDSLTFKEDIQKAQVSGQGDSLHEHIANLAGSPAIKKGILQTVKVVDELVKVMGRHKPENIVIEMARENQTTQKGQKNSRERMKRIEEGIKELGSQILKEHPVENTQLQNEKLYLYYLQNGRDMYVDQELDINRLSDYDVDHIVPQSFLADDSIDNKVLTRSDKNRGKSDNVPSEEVVKKMKNYWRQLLNAKLITQRKFDNLTKAERGGLSELDKAGFIKRQLVETRQITKHVAQILDSRMNTKYDENDKLIREVKVITLKSKLVSDFRKDFQFYKVREINNYHHAHDAYLNAVVGTALIKKYPALESEFVYGDYKVYDVRKMIAKSEQEIGKATAKYFFYSNIMNFFKTEITLANGEIRKAPLIETNGETGEIVWDKGRDFATVRKVLSMPQVNIVKKTEVQTGGFSKESILPKRNSDKLIARKKDWDPKKYGGFDSPTVAYSVLVVAKVEKGKSKKLKSVKELLGITIMERSSFEKNPIDFLEAKGYKEVKKDLIIKLPKYSLFELENGRKRMLASAGELQKGNELALPSKYVNFLYLASHYEKLKGSPEDNEQKQLFVEQHKHYLDEIIEQISEFSKRVILADANLDKVLSAYNKHRDKPIREQAENIIHLFTLTNLGAPAAFKYFDTTIDRKRYTSTKEVLDATLIHQSITGLYETRIDLSQLGGD

SEQ ID NO: 83 - protein, 228 aa, Rattus norvegicus
SSETGPVAVDPTLRRRIEPHEFEVFFDPRELRKETCLLYEINWGGRHSIWRHTSQNTNKHVEVNFIEKFTTERYFCPNTRCSITWFLSWSPCGECSRAITEFLSRYPHVTLFIYIARLYHHADPRNRQGLRDLISSGVTIQIMTEQESGYCWRNFVNYSPSNEAHWPRYPHLWVRLYVLELYCIILGLPPCLNILRRKQPQLTFFTIALQSCHYQRLPPHILWATGLK

SEQ ID NO: 84 - protein, 199 aa, Homo sapiens
MEASPASGPRHLMDPHIFTSNFNNGIGRHKTYLCYEVERLDNGTSVKMDQHRGFLHNQAKNLLCGFYGRHAELRFLDLVPSLQLDPAQIYRVTWFISWSPCFSWGCAGEVRAFLQENTHVRLRIFAARIYDYDPLYKEALQMLRDAGAQVSIMTYDEFKHCWDTFVDHQGCPFQPWDGLDEHSQALSGRLRAILQNQGN

SEQ ID NO: 85 - DNA, 621 bp, Petromyzon marinus
acagatgcagagtatgtgagaattcacgaaaagctggacatctataccttcaagaagcagttctttaacaataagaagtctgtgagccataggtgctacgtgctgttcgagctgaagagaaggggtgaaagaagggcatgtttttgggggtatgctgtgaacaagccccagtctggaactgagagaggcattcacgccgaaattttcagcatcagaaaggtggaggaatacctgagggataaccctggacagtttacaattaattggtattctagctggtctccatgcgctgactgtgccgagaagatcctggaatggtacaaccaggagctgagaggaaatggccataccctgaagatttgggcctgcaagctgtactatgaaaagaacgcaagaaatcagatcggactgtggaacctgagggataatggtgtggggctgaacgtgatggtgtccgagcactatcagtgctgtagaaagattttcattcagtcctcacataatcagctgaacgagaatagatggctggaaaagactctgaagagggctgagaagagaaggtccgaactgtcaattatgatccaggtgaagatcctgcacaccactaagtcacctgccgtg

SEQ ID NO: 86 - protein, 160 aa, Artificial sequence
  Synthetic polypeptide
FERNYDPRELRKETYLLYEIKWGKSGKLWRHWCQNNRTQHAEVYFLENIFNARRFNPSTHCSITWYLSWSPCAECSQKIVDFLKEHPNVLEIYVARLYYHEDERNRQGLRDLVNSGVTIRIMDLPDYNYCWKTFVSDQGGDEDYWPGHFAPWIKQYSLKL

SEQ ID NO: 87 - protein, 229 aa, Rattus norvegicus [sequence omitted]

SEQ ID NO: 88 - protein, 198 aa, Homo sapiens [sequence omitted]

SEQ ID NO: 89 - protein, 197 aa, Artificial sequence
  Synthetic polypeptide
MDSLLMNRREFLYQFKNVRWAKGRRETYLCYVVKRRDSATSFSLDFGYLRNKNGCHVELLFLRYISDWDLDPGRCYRVTWFISWSPCYDCARHVADFLRGNPNLSLRIFTARLYFCEDRKAEPEGLRRLHRAGVQIAIMTFKDYFYCWNTFVENHGRTFKAWEGLHENSVRLSRQLRRILLPLYEVDDLRDAFRTCT

SEQ ID NO: 90 - protein, 207 aa, Artificial sequence
  Synthetic polypeptide
TDAEYVRIHEKLDIYTFKKQFSNNKKSVSHRCYVLFELKRRGERRACFWGYAVNKPQSGTERGIHAEIFSIRKVEEYLRDNPGQFTINWYSSWSPCADCAEKILEWYNQELRGNGHTLKIWVCKLYYEKNARNQIGLWNLRDNGVGLNVMVSEHYQCCRKIFIQSSHNQLNENRWLEKTLKRAEKRRSELSIMFQVKILHTTKSPAV

SEQ ID NO: 91 - protein, 228 aa, Artificial sequence
  Synthetic polypeptide
SSKTGPVAVDPTLRRRIEPHEFEVFFDPRELRKETCLLYEINWGGRHSIWRHTSQNTNKHVEVNFIEKFTTERYFCPNTRCSITWFLSWSPCGECSRAITEFLSRYPNVTLFIYIARLYHLANPRNRQGLRDLISSGVTIQIMTEQESGYCWHNFVNYSPSNESHWPRYPHLWVRLYVLELYCIILGLPPCLNILRRKQSQLTSFTIALQSCHYQRLPPHILWATGLK

SEQ ID NO: 92 - protein, 162 aa, Artificial sequence
  Synthetic polypeptide
SFERNYDPRELRKETYLLYEIKWGKSGKLWRHWCQNNRTQHAEVYFLENIFNARRFNPSTHCSITWYLSWSPCAECSQKIVDFLKEHPNVNLEIYVARLYYPENERNRQGLRDLVNSGVTIRIMDLPDYNYCWKTFVSDQGGDEDYWPGHFAPWIKQYSLKL

SEQ ID NO: 93 - protein, 166 aa, Escherichia coli
SEVEFSHEYWMRHALTLAKRAWDEREVPVGAVLVHNNRVIGEGWNRPIGRHDPTAHAEIMALRQGGLVMQNYRLIDATLYVTLEPCVMCAGAMIHSRIGRVVFGARDAKTGAAGSLMDVLHHPGMNHRVEITEGILADECAALLSDFFRMRRQEIKAQKKAQSSTD

SEQ ID NO: 94 - protein, 166 aa, Artificial sequence
  Synthetic polypeptide
SEVEFSHEYWMRHALTLAKRARDEREVPVGAVLVLNNRVIGEGWNRAIGLHDPTAHAEIMALRQGGLVMQNYRLIDATLYVTFEPCVMCAGAMIHSRIGRVVFGVRNAKTGAAGSLMDVLHYPGMNHRVEITEGILADECAALLCYFFRMPRQVFNAQKKAQSSTD

SEQ ID NO: 95 - protein, 166 aa, Artificial sequence
  Synthetic polypeptide
SEVEFSHEYWMRHALTLAKRAWDEREVPVGAVLVLNNRVIGEGWNRSIGLHDPTAHAEIMALRQGGLVMQNYRLIDATLYVTFEPCVMCAGAMIHSRIGRVVFGVRNAKTGAAGSLMDVLHYPGMNHRVEITEGILADECAALLCYFFRMRRQVFNAQKKAQSSTD

SEQ ID NO: 96 - protein, 166 aa, Artificial sequence
  Synthetic polypeptide
SEVEFSHEYWMRHALTLAKRALDEREVPVGAVLVLNNRVIGEGWNRAIGLHDPTAHAEIMALRQGGLVMQNYRLIDATLYVTFEPCVMCAGAMIHSRIGRVVFGVRNAKTGAAGSLMDVLHYPGMNHRVEITEGILADECNALLCYFFRMRRQVFNAQKKAQSSTD

SEQ ID NO: 97 - protein, 166 aa, Artificial sequence
  Synthetic polypeptide
SEVEFSHEYWMRHALTLAKRALDEREVPVGAVLVLNNRVIGEGWNRAIGLHDPTAHAEIMALRQGGLVMQNYRLIDATLYVTFEPCVMCAGAMIHSRIGRVVFGVRNAKTGAAGSLMDVLHYPGMNHRVEITEGILADECNALLCYFFRMPRQVFNAQKKAQSSTD

SEQ ID NO: 98 - protein, 1763 aa, Artificial sequence
  Synthetic polypeptide
SEVEFSHEYWMRHALTLAKRAWDEREVPVGAVLVHNNRVIGEGWNRPIGRHDPTAHAEIMALRQGGLVMQNYRLIDATLYVTLEPCVMCAGAMIHSRIGRVVFGARDAKTGAAGSLMDVLHHPGMNHRVEITEGILADECAALLSDFFRMRRQEIKAQKKAQSSTDSGGSSGGSSGSETPGTSESATPESSGGSSGGSSEVEFSHEYWMRHALTLAKRARDEREVPVGAVLVLNNRVIGEGWNRAIGLHDPTAHAEIMALRQGGLVMQNYRLIDATLYVTFEPCVMCAGAMIHSRIGRVVFGVRNAKTGAAGSLMDVLHYPGMNHRVEITEGILADECAALLCYFFRMPRQVFNAQKKAQSSTDSGGSSGGSSGSETPGTSESATPESSGGSSGGSDKKYSIGLAIGTNSVGWAVITDEYKVPSKKFKVLGNTDRHSIKKNLIGALLFDSGETAEATRLKRTARRRYTRRKNRICYLQEIFSNEMAKVDDSFFHRLEESFLVEEDKKHERHPIFGNIVDEVAYHEKYPTIYHLRKKLVDSTDKADLRLIYLALAHMIKFRGHFLIEGDLNPDNSDVDKLFIQLVQTYNQLFEENPINASGVDAKAILSARLSKSRRLENLIAQLPGEKKNGLFGNLIALSLGLTPNFKSNFDLAEDAKLQLSKDTYDDDLDNLLAQIGDQYADLFLAAKNLSDAILLSDILRVNTEITKAPLSASMIKRYDEHHQDLTLLKALVRQQLPEKYKEIFFDQSKNGYAGYIDGGASQEEFYKFIKPILEKMDGTEELLVKLNREDLLRKQRTFDNGSIPHQIHLGELHAILRRQEDFYPFLKDNREKIEKILTFRIPYYVGPLARGNSRFAWMTRKSEETITPWNFEEVVDKGASAQSFIERMTNFDKNLPNEKVLPKHSLLYEYFTVYNELTKVKYVTEGMRKPAFLSGEQKKAIVDLLFKTNRKVTVKQLKEDYFKKIECFDSVEISGVEDRFNASLGTYHDLLKIIKDKDFLDNEENEDILEDIVLTLTLFEDREMIEERLKTYAHLFDDKVMKQLKRRRYTGWGRLSRKLINGIRDKQSGKTILDFLKSDGFANRNFMQLIHDDSLTFKEDIQKAQVSGQGDSLHEHIANLAGSPAIKKGILQTVKVVDELVKVMGRHKPENIVIEMARENQTTQKGQKNSRERMKRIEEGIKELGSQILKEHPVENTQLQNEKLYLYYLQNGRDMYVDQELDINRLSDYDVDHIVPQSFLKDDSIDNKVLTRSDKNRGKSDNVPSEEVVKKMKNYWRQLLNAKLITQRKFDNLTKAERGGLSELDKAGFIKRQLVETRQITKHVAQILDSRMNTKYDENDKLIREVKVITLKSKLVSDFRKDFQFYKVREINNYHHAHDAYLNAVVGTALIKKYPKLESEFVYGDYKVYDVRKMIAKSEQEIGKATAKYFFYSNIMNFFKTEITLANGEIRKRPLIETNGETGEIVWDKGRDFATVRKVLSMPQVNIVKKTEVQTGGFSKESILPKRNSDKLIARKKDWDPKKYGGFDSPTVAYSVLVVAKVEKGKSKKLKSVKELLGITIMERSSFEKNPIDFLEAKGYKEVKKDLIIKLPKYSLFELENGRKRMLASAGELQKGNELALPSKYVNFLYLASHYEKLKGSPEDNEQKQLFVEQHKHYLDEIIEQISEFSKRVILADANLDKVLSAYNKHRDKPIREQAENIIHLFTLTNLGAPAAFKYFDTTIDRKRYTSTKEVLDATLIHQSITGLYETRIDLSQLGGD

SEQ ID NO: 99 - protein, 1565 aa, Artificial sequence
  Synthetic polypeptide
SEVEFSHEYWMRHALTLAKRARDEREVPVGAVLVLNNRVIGEGWNRAIGLHDPTAHAEIMALRQGGLVMQNYRLIDATLYVTFEPCVMCAGAMIHSRIGRVVFGVRNSKRGAAGSLMNVLNYPGMNHRVEITEGILADECAALLCDFYRMPRQVFNAQKKAQSSINSGGSSGGSSGSETPGTSESATPESSGGSSGGSDKKYSIGLAIGTNSVGWAVITDEYKVPSKKFKVLGNTDRHSIKKNLIGALLFDSGETAEATRLKRTARRRYTRRKNRICYLQEIFSNEMAKVDDSFFHRLEESFLVEEDKKHERHPIFGNIVDEVAYHEKYPTIYHLRKKLVDSTDKADLRLIYLALAHMIKFRGHFLIEGDLNPDNSDVDKLFIQLVQTYNQLFEENPINASGVDAKAILSARLSKSRRLENLIAQLPGEKKNGLFGNLIALSLGLTPNFKSNFDLAEDAKLQLSKDTYDDDLDNLLAQIGDQYADLFLAAKNLSDAILLSDILRVNTEITKAPLSASMIKRYDEHHQDLTLLKALVRQQLPEKYKEIFFDQSKNGYAGYIDGGASQEEFYKFIKPILEKMDGTEELLVKLNREDLLRKQRTFDNGSIPHQIHLGELHAILRRQEDFYPFLKDNREKIEKILTFRIPYYVGPLARGNSRFAWMTRKSEETITPWNFEEVVDKGASAQSFIERMTNFDKNLPNEKVLPKHSLLYEYFTVYNELTKVKYVTEGMRKPAFLSGEQKKAIVDLLFKTNRKVTVKQLKEDYFKKIECFDSVEISGVEDRFNASLGTYHDLLKIIKDKDFLDNEENEDILEDIVLTLTLFEDREMIEERLKTYAHLFDDKVMKQLKRRRYTGWGRLSRKLINGIRDKQSGKTILDFLKSDGFANRNFMQLIHDDSLTFKEDIQKAQVSGQGDSLHEHIANLAGSPAIKKGILQTVKVVDELVKVMGRHKPENIVIEMARENQTTQKGQKNSRERMKRIEEGIKELGSQILKEHPVENTQLQNEKLYLYYLQNGRDMYVDQELDINRLSDYDVDHIVPQSFLKDDSIDNKVLTRSDKNRGKSDNVPSEEVVKKMKNYWRQLLNAKLITQRKFDNLTKAERGGLSELDKAGFIKRQLVETRQITKHVAQILDSRMNTKYDENDKLIREVKVITLKSKLVSDFRKDFQFYKVREINNYHHAHDAYLNAVVGTALIKKYPKLESEFVYGDYKVYDVRKMIAKSEQEIGKATAKYFFYSNIMNFFKTEITLANGEIRKRPLIETNGETGEIVWDKGRDFATVRKVLSMPQVNIVKKTEVQTGGFSKESILPKRNSDKLIARKKDWDPKKYGGFDSPTVAYSVLVVAKVEKGKSKKLKSVKELLGITIMERSSFEKNPIDFLEAKGYKEVKKDLIIKLPKYSLFELENGRKRMLASAGELQKGNELALPSKYVNFLYLASHYEKLKGSPEDNEQKQLFVEQHKHYLDEIIEQISEFSKRVILADANLDKVLSAYNKHRDKPIREQAENIIHLFTLTNLGAPAAFKYFDTTIDRKRYTSTKEVLDATLIHQSITGLYETRIDLSQLGGD

SEQ ID NO: 100 - protein, 1565 aa, Artificial sequence
  Synthetic polypeptide
SEVEFSHEYWMRHALTLAKRARDEREVPVGAVLVLNNRVIGEGWNRAIGLHDPTAHAEIMALRQGGLVMQNYRLYDATLYSTFEPCVMCAGAMIHSRIGRVVFGVRNAKTGAAGSLMDVLHHPGMNHRVEITEGILADECAALLCRFFRMPRRVFNAQKKAQSSTDSGGSSGGSSGSETPGTSESATPESSGGSSGGSDKKYSIGLAIGTNSVGWAVITDEYKVPSKKFKVLGNTDRHSIKKNLIGALLFDSGETAEATRLKRTARRRYTRRKNRICYLQEIFSNEMAKVDDSFFHRLEESFLVEEDKKHERHPIFGNIVDEVAYHEKYPTIYHLRKKLVDSTDKADLRLIYLALAHMIKFRGHFLIEGDLNPDNSDVDKLFIQLVQTYNQLFEENPINASGVDAKAILSARLSKSRRLENLIAQLPGEKKNGLFGNLIALSLGLTPNFKSNFDLAEDAKLQLSKDTYDDDLDNLLAQIGDQYADLFLAAKNLSDAILLSDILRVNTEITKAPLSASMIKRYDEHHQDLTLLKALVRQQLPEKYKEIFFDQSKNGYAGYIDGGASQEEFYKFIKPILEKMDGTEELLVKLNREDLLRKQRTFDNGSIPHQIHLGELHAILRRQEDFYPFLKDNREKIEKILTFRIPYYVGPLARGNSRFAWMTRKSEETITPWNFEEVVDKGASAQSFIERMTNFDKNLPNEKVLPKHSLLYEYFTVYNELTKVKYVTEGMRKPAFLSGEQKKAIVDLLFKTNRKVTVKQLKEDYFKKIECFDSVEISGVEDRFNASLGTYHDLLKIIKDKDFLDNEENEDILEDIVLTLTLFEDREMIEERLKTYAHLFDDKVMKQLKRRRYTGWGRLSRKLINGIRDKQSGKTILDFLKSDGFANRNFMQLIHDDSLTFKEDIQKAQVSGQGDSLHEHIANLAGSPAIKKGILQTVKVVDELVKVMGRHKPENIVIEMARENQTTQKGQKNSRERMKRIEEGIKELGSQILKEHPVENTQLQNEKLYLYYLQNGRDMYVDQELDINRLSDYDVDHIVPQSFLKDDSIDNKVLTRSDKNRGKSDNVPSEEVVKKMKNYWRQLLNAKLITQRKFDNLTKAERGGLSELDKAGFIKRQLVETRQITKHVAQILDSRMNTKYDENDKLIREVKVITLKSKLVSDFRKDFQFYKVREINNYHHAHDAYLNAVVGTALIKKYPKLESEFVYGDYKVYDVRKMIAKSEQEIGKATAKYFFYSNIMNFFKTEITLANGEIRKRPLIETNGETGEIVWDKGRDFATVRKVLSMPQVNIVKKTEVQTGGFSKESILPKRNSDKLIARKKDWDPKKYGGFDSPTVAYSVLVVAKVEKGKSKKLKSVKELLGITIMERSSFEKNPIDFLEAKGYKEVKKDLIIKLPKYSLFELENGRKRMLASAGELQKGNELALPSKYVNFLYLASHYEKLKGSPEDNEQKQLFVEQHKHYLDEIIEQISEFSKRVILADANLDKVLSAYNKHRDKPIREQAENIIHLFTLTNLGAPAAFKYFDTTIDRKRYTSTKEVLDATLIHQSITGLYETRIDLSQLGGD

SEQ ID NO: 101 - protein, 364 aa, Artificial sequence
  Synthetic polypeptide
SEVEFSHEYWMRHALTLAKRAWDEREVPVGAVLVHNNRVIGEGWNRPIGRHDPTAHAEIMALRQGGLVMQNYRLIDATLYVTLEPCVMCAGAMIHSRIGRVVFGARDAKTGAAGSLMDVLHHPGMNHRVEITEGILADECAALLSDFFRMRRQEIKAQKKAQSSTDSGGSSGGSSGSETPGTSESATPESSGGSSGGSSEVEFSHEYWMRHALTLAKRARDEREVPVGAVLVLNNRVIGEGWNRAIGLHDPTAHAEIMALRQGGLVMQNYRLIDATLYVTFEPCVMCAGAMIHSRIGRVVFGVRNAKTGAAGSLMDVLHYPGMNHRVEITEGILADECAALLCYFFRMPRQVFNAQKKAQSSTD

SEQ ID NO: 102 - protein, 167 aa, Artificial sequence
  Synthetic polypeptide
MSEVEFSHEYWMRHALTLAKRARDEREVPVGAVLVLNNRVIGEGWNRAIGLHDPTAHAEIMALRQGGLVMQNYRLYDATLYSTFEPCVMCAGAMIHSRIGRVVFGVRNAKTGAAGSLMDVLHHPGMNHRVEITEGILADECAALLCRFFRMPRRVFNAQKKAQSSTD

SEQ ID NO: 103 - protein, 167 aa, Artificial sequence
  Synthetic polypeptide
MSEVEFSHEYWMRHALTLAKRARDEREVPVGAVLVLNNRVIGEGWNRAIGLHDPTAHAEIMALRQGGLVMQNYRLIDATLYVTFEPCVMCAGAMIHSRIGRVVFGVRNSKRGAAGSLMNVLNYPGMNHRVEITEGILADECAALLCDFYRMPRQVFNAQKKAQSSIN

SEQ ID NO: 104 - protein, 83 aa, Bacillus phage AR9
TNLSDIIEKETGKQLVIQESILMLPEEVEEVIGNKPESDILVHTAYDESTDENVMLLTSDAPEYKPWALVIQDSNGENKIKML

SEQ ID NO: 105 - RNA, 19 nt, Artificial sequence
  Synthetic oligonucleotide
  misc_feature (1)..(19): n is a, c, g, or u
nnnnnnnnnnnnnnnnnnn

SEQ ID NO: 106 - DNA, 22 bp, Artificial sequence
  Synthetic oligonucleotide
  misc_feature (4)..(22): n is a, c, g, or t
aaannnnnnnnnnnnnnnnnnn

SEQ ID NO: 107 - DNA, 22 bp, Artificial sequence
  Synthetic oligonucleotide
  misc_feature (4)..(22): n is a, c, g, or t
tttnnnnnnnnnnnnnnnnnnn

SEQ ID NO: 108 - DNA, 66 bp, Saccharomyces bayanus
ttcttgtcgtacttatagatcgctacgttatttcaattttgaaaatctgagtcctgggagtgcgga

SEQ ID NO: 109 - protein, 605 aa, Homo sapiens
MSGWESYYKTEGDEEAEEEQEENLEASGDYKYSGRDSLIFLVDASKAMFESQSEDELTPFDMSIQCIQSVYISKIISSDRDLLAWFYGTEKDKNSVNFKIYVLQELDNPGAKRILELDQFKGQQGQKRFQDMMGHGSDYSLSEVLWVCANLFSDVQFKMSHKRIMLFTNEDNPHGNDSAKASRARTKAGDLRDTGIFLDLHLKKPGGFDISLFYRDIISIAEDEDLRVHFEESSKLEDLLRKVRAKETRKRALSRLKLKLNKDIVISVGIYNLVQKALKPPPIKLYRETNEPVKTKTRTFNTSTGGLLLPSDTKRSQIYGSRQIILEKEETEELKRFDDPGLMLMGFKPLVLLKKHHYLRPSLFVYPEESLVIGSSTLFSALLIKCLEKEVAALCRYTPRRNIPPYFVALVPQEEELDDQKIQVTPPGFQLVFLPFADDKRKMPFTEKIMATPEQVGKMKAIVEKLRFTYRSDSFENPVLQQHFRNLEALALDLMEPEQAVDLTLPKVEAMNKRLGSLVDEFKELVYPPDYNPEGKVTKRKHDNEGSGSKRPKVEYSEEELKTHISKGTLGKFTVPLKEACRAYGLKSGLKKQELLEALTKHFQD

SEQ ID NO: 110 - protein, 482 aa, Artificial sequence
  Synthetic polypeptide
MVRSGNKAAWLCMDVGFTMSNSIPGIESPFEQAKKVITMFVQRQVFAENKDEIALVLFGTDGTDNPLSGGDQYQNITVHRHLMLPDFDLLEDIESKIQPGSQQADFLDALIVSMDVIQHETIGKKFEKRHIEIFTDLSSRFSKSQLDIIIHSLKKCDISERHSIHWPCRLTIGSNLSIRIAAYKSILQERVKKTTWDAKTLKKEDIQKETVYCLNDDDETEVLKEDIIQGFRYGSDIVPFSKVDEEQMKYKSEGKCFSVLGFCKSSQVQRRFFMGNQVLKVFAARDDEAAAVALSSLIHALDDLDIWAIVRYAYDKRANPQVGVAFPHIKHNYECLVYVQLPFMEDLRQYMFSSLKNSKKYAPTEAQLNAVDALIDSMSLAKKDEKTDTLEDLFPTTKIPNPRFQRLFQCLLHRALHPREPLPPIQQHIWNMLNPPAEVTTKSQIPLSKIKTLFPLIEAKKKDQVTAQEIFQDNHEDGPTAK

SEQ ID NO: 111 - DNA, 10 bp, Methanobacterium thermoautotrophicum
aatttttgga

SEQ ID NO: 112 - protein, 83 aa, Methanobacterium thermoautotrophicum
GSVIDVSSQRVNVQRPLDALGNSLNSPVIIKLKGDREFRGVLKSFDLHMNLVLNDAEELEDGEVTRRLGTVLIRGDNIVYISP

SEQ ID NO: 113 - DNA, 25 bp, Escherichia virus MS2
gcgcacatgaggatcacccatgtgc

SEQ ID NO: 114 - protein, 116 aa, Escherichia virus MS2
MASNFTQFVLVDNGGTGDVTVAPSNFANGIAEISSNSRSQAYKVTCSVRQSSAQNRKYTIKVEVPKGAWRSYLNMELTIPIFATNSDCELIVKAMQGLLKDGNPIPSAIAANSGIY

SEQ ID NO: 115 - DNA, 26 bp, Bacteriophage PP7
ataaggagtttatatggaaaccctta

SEQ ID NO: 116 - protein, 127 aa, Bacteriophage PP7
MSKTIVLSVGEATRTLTEIQSTADRQIFEEKVGPLVGRLRLTASLRQNGAKTAYRVNLKLDQADWDCSTSVCGELPKVRYTQVWSHDVTIVANSTEASRKSLYDLTKSLVATSQVEDLVVNLVPLGR

SEQ ID NO: 117 - DNA, 19 bp, Shigella flexneri
ctgaatgcctgcgagcatc

SEQ ID NO: 118 - protein, 62 aa, Shigella flexneri
MKSIRCKNCNKLLFKADSFDHIEIRCPRCKRHIIMLNACEHPTEKHCGKREKITHSDETVRY

SEQ ID NO: 119 - protein, 24 aa, Artificial sequence
  Synthetic peptide
EELLSKNYHLENEVARLKKGSGSG

SEQ ID NO: 120 - protein, 241 aa, Artificial sequence
  Synthetic polypeptide
EEELLSKNYHLENEVARLKKGSGSGEELLSKNYHLENEVARLKKGSGSGEELLSKNYHLENEVARLKKGSGSGEELLSKNYHLENEVARLKKGSGSGEELLSKNYHLENEVARLKKGSGSGEELLSKNYHLENEVARLKKGSGSGEELLSKNYHLENEVARLKKGSGSGEELLSKNYHLENEVARLKKGSGSGEELLSKNYHLENEVARLKKGSGSGEELLSKNYHLENEVARLKKGSGSG

SEQ ID NO: 121 - protein, 277 aa, Artificial sequence
  Synthetic polypeptide
MGPDIVMTQSPSSLSASVGDRVTITCRSSTGAVTTSNYASWVQEKPGKLFKGLIGGTNNRAPGVPSRFSGSLIGDKATLTISSLQPEDFATYFCALWYSNHWVFGQGTKVELKRGGGGSGGGGSGGGGSSGGGSEVKLLESGGGLVQPGGSLKLSCAVSGFSLTDYGVNWVRQAPGRGLEWIGVIWGDGITDYNSALKDRFIISKDNGKNTVYLQMSKVRSDDTALYYCVTGLFDYWGQGTLVTVSSYPYDVPDYAGGGGGSGGGGSGGGGSGGGGS

SEQ ID NO: 122 - protein, 11 aa, Unknown
  Lachnospiraceae bacterium
GFVTESGEKIK

SEQ ID NO: 123 - DNA, 27 bp, Artificial sequence
  Synthetic oligonucleotide
tttaggaatcccttctgcagcacctgg

SEQ ID NO: 124 - RNA, 43 nt, Artificial sequence
  Synthetic oligonucleotide
aauuucuacuaaguguagauggaaucccuucugcagcaccugg

SEQ ID NO: 125 - protein, 1373 aa, Artificial sequence; identical to SEQ ID NO: 10
  Synthetic polypeptide

SEQ ID NO: 126 - protein, 1375 aa, Artificial sequence; identical to SEQ ID NO: 11
  Synthetic polypeptide

SEQ ID NO: 127 - protein, 1377 aa, Artificial sequence; identical to SEQ ID NO: 12
  Synthetic polypeptide

SEQ ID NO: 128 - protein, 1379 aa, Artificial sequence; identical to SEQ ID NO: 13
  Synthetic polypeptide

SEQ ID NO: 129 - protein, 1373 aa, Artificial sequence; identical to SEQ ID NO: 14
  Synthetic polypeptide

SEQ ID NO: 130 - protein, 1375 aa, Artificial sequence; identical to SEQ ID NO: 15
  Synthetic polypeptide

SEQ ID NO: 131 - protein, 1377 aa, Artificial sequence; identical to SEQ ID NO: 16
  Synthetic polypeptide

SEQ ID NO: 132 - protein, 1379 aa, Artificial sequence; identical to SEQ ID NO: 17
  Synthetic polypeptide

SEQ ID NO: 133 - DNA, 46 bp, Artificial sequence
  Synthetic oligonucleotide
gatgctttaggaatcccttctgcagcacctgggcgcaggtcacgag

SEQ ID NO: 134 - DNA, 99 bp, Homo sapiens
cctccggattcctaccccgaaaagacagtggttaggacagggatcaccggggtgacaccccacctcccctgtctattttcatgggtcttggtctcggtg

SEQ ID NO: 135 - DNA, 99 bp, Homo sapiens
ggaggcctaaggatggggcttttctgtcaccaatcctgtccctagtggccccactgtggggtggaggggacagataaaagtacccagaaccagagccac

SEQ ID NO: 136 - DNA, 20 bp, Homo sapiens
gcattttcaggaggaagcga

SEQ ID NO: 137 - DNA, 23 bp, Homo sapiens
caggaggaagcgatggcttcaga

SEQ ID NO: 138 - DNA, 20 bp, Homo sapiens
gtcccctccaccccacagtg

SEQ ID NO: 139 - DNA, 23 bp, Homo sapiens
tctgtcccctccaccccacagtg

SEQ ID NO: 140 - DNA, 4101 bp, Artificial sequence
  Synthetic polynucleotide
gacaagaagtacagcatcggcctggacatcggcaccaactctgtgggctgggccgtgatcaccgacgagtacaaggtgcccagcaagaaattcaaggtgctgggcaacaccgaccggcacagcatcaagaagaacctgatcggagccctgctgttcgacagcggcgaaacagccgaggccacccggctgaagagaaccgccagaagaagatacaccagacggaagaaccggatctgctatctgcaagagatcttcagcaacgagatggccaaggtggacgacagcttcttccacagactggaagagtccttcctggtggaagaggataagaagcacgagcggcaccccatcttcggcaacatcgtggacgaggtggcctaccacgagaagtaccccaccatctaccacctgagaaagaaactggtggacagcaccgacaaggccgacctgcggctgatctatctggccctggcccacatgatcaagttccggggccacttcctgatcgagggcgacctgaaccccgacaacagcgacgtggacaagctgttcatccagctggtgcagacctacaaccagctgttcgaggaaaaccccatcaacgccagcggcgtggacgccaaggccatcctgtctgccagactgagcaagagcagacggctggaaaatctgatcgcccagctgcccggcgagaagaagaatggcctgttcggaaacctgattgccctgagcctgggcctgacccccaacttcaagagcaacttcgacctggccgaggatgccaaactgcagctgagcaaggacacctacgacgacgacctggacaacctgctggcccagatcggcgaccagtacgccgacctgtttctggccgccaagaacctgtccgacgccatcctgctgagcgacatcctgagagtgaacaccgagatcaccaaggcccccctgagcgcctctatgatcaagagatacgacgagcaccaccaggacctgaccctgctgaaagctctcgtgcggcagcagctgcctgagaagtacaaagagattttcttcgaccagagcaagaacggctacgccggctacattgacggcggagccagccaggaagagttctacaagttcatcaagcccatcctggaaaagatggacggcaccgaggaactgctcgtgaagctgaacagagaggacctgctgcggaagcagcggaccttcgacaacggcagcatcccccaccagatccacctgggagagctgcacgccattctgcggcggcaggaagatttttacccattcctgaaggacaaccgggaaaagatcgagaagatcctgaccttccgcatcccctactacgtgggccctctggccaggggaaacagcagattcgcctggatgaccagaaagagcgaggaaaccatcaccccctggaacttcgaggaagtggtggacaagggcgcttccgcccagagcttcatcgagcggatgaccaacttcgataagaacctgcccaacgagaaggtgctgcccaagcacagcctgctgtacgagtacttcaccgtgtataacgagctgaccaaagtgaaatacgtgaccgagggaatgagaaagcccgccttcctgagcggcgagcagaaaaaggccatcgtggacctgctgttcaagaccaaccggaaagtgaccgtgaagcagctgaaagaggactacttcaagaaaatcgagtgcttcgactccgtggaaatctccggcgtggaagatcggttcaacgcctccctgggcacataccacgatctgctgaaaattatcaaggacaaggacttcctggacaatgaggaaaacgaggacattctggaagatatcgtgctgaccctgacactgtttgaggacagagagatgatcgaggaacggctgaaaacctatgcccacctgttcgacgacaaagtgatgaagcagctgaagcggcggagatacaccggctggggcaggctgagccggaagctgatcaacggcatccgggacaagcagtccggcaagacaatcctggatttcctgaagtccgacggcttcgccaacagaaacttcatgcagctgatccacgacgacagcctgacctttaaagaggacatccagaaagcccaggtgtccggccagggcgatagcctgcacgagcacattgccaatctggccggcagccccgccattaagaagggcatcctgcagacagtgaaggtggtggacgagctcgtgaaagtgatgggccggcacaagcccgagaacatcgtgatcgaaatggccagagagaaccagaccacccagaagggacagaagaacagccgcgagagaatgaagcggatcgaagagggcatcaaagagctgggcagccagatcctgaaagaacaccccgtggaaaacacccagctgcagaacgagaagctgtacctgtactacctgcagaatgggcgggatatgtacgtggaccaggaactggacatcaaccggctgtccgactacgatgtggaccatatcgtgcctcagagctttctgaaggacgactccatcgacaacaaggtgctgaccagaagcgacaagaaccggggcaagagcgacaacgtgccctccgaagaggtcgtgaagaagatgaagaactactggcggcagctgctgaacgccaagctgattacccagagaaagttcgacaatctgaccaaggccgagagaggcggcctgagcgaactggataaggccggcttcatcaagagacagctggtggaaacccggcagatcacaaagcacgtggcacagatcctggactcccggatgaacactaagtacgacgagaatgacaagctgatccgggaagtgaaagtgatcaccctgaagtccaagctggtgtccgatttccggaaggatttccagttttacaaagtgcgcgagatcaacaactaccaccacgcccacgacgcctacctgaacgccgtcgtgggaaccgccctgatcaaaaagtaccctaagctggaaagcgagttcgtgtacggcgactacaaggtgtacgacgtgcggaagatgatcgccaagagcgagcaggaaatcggcaaggctaccgccaagtacttcttctacagcaacatcatgaactttttcaagaccgagattaccctggccaacggcgagatccggaagcggcctctgatcgagacaaacggcgaaaccggggagatcgtgtgggataagggccgggattttgccaccgtgcggaaagtgctgagcatgccccaagtgaatatcgtgaaaaagaccgaggtgcagacaggcggcttcagcaaagagtctatcctgcccaagaggaacagcgataagctgatcgccagaaagaaggactgggaccctaagaagtacggcggcttcgacagccccaccgtggcctattctgtgctggtggtggccaaagtggaaaagggcaagtccaagaaactgaagagtgtgaaagagctgctggggatcaccatcatggaaagaagcagcttcgagaagaatcccatcgactttctggaagccaagggctacaaagaagtgaaaaaggacctgatcatcaagctgcctaagtactccctgttcgagctggaaaacggccggaagagaatgctggcctctgccggcgaactgcagaagggaaacgaactggccctgccctccaaatatgtgaacttcctgtacctggccagccactatgagaagctgaagggctcccccgaggataatgagcagaaacagctgtttgtggaacagcacaagcactacctggacgagatcatcgagcagatcagcgagttctccaagagagtgatcctggccgacgctaatctggacaaagtgctgtccgcctacaacaagcaccgggataagcccatcagagagcaggccgagaatatcatccacctgtttaccctgaccaatctgggagcccctgccgccttcaagtactttgacaccaccatcgaccggaagaggtacaccagcaccaaagaggtgctggacgccaccctgatccaccagagcatcaccggcctgtacgagacacggatcgacctgtctcagctgggaggtgac

SEQ ID NO: 141 - DNA, 4101 bp, Artificial sequence
  Synthetic polynucleotide
gacaagaagtacagcatcggcctggacatcggcaccaactctgtgggctgggccgtgatcaccgacgagtacaaggtgcccagcaagaaattcaaggtgctgggcaacaccgaccggcacagcatcaagaagaacctgatcggagccctgctgttcgacagcggcgaaacagccgaggccacccggctgaagagaaccgccagaagaagatacaccagacggaagaaccggatctgctatctgcaagagatcttcagcaacgagatggccaaggtggacgacagcttcttccacagactggaagagtccttcctggtggaagaggataagaagcacgagcggcaccccatcttcggcaacatcgtggacgaggtggcctaccacgagaagtaccccaccatctaccacctgagaaagaaactggtggacagcaccgacaaggccgacctgcggctgatctatctggccctggcccacatgatcaagttccggggccacttcctgatcgagggcgacctgaaccccgacaacagcgacgtggacaagctgttcatccagctggtgcagacctacaaccagctgttcgaggaaaaccccatcaacgccagcggcgtggacgccaaggccatcctgtctgccagactgagcaagagcagacggctggaaaatctgatcgcccagctgcccggcgagaagaagaatggcctgttcggaaacctgattgccctgagcctgggcctgacccccaacttcaagagcaacttcgacctggccgaggatgccaaactgcagctgagcaaggacacctacgacgacgacctggacaacctgctggcccagatcggcgaccagtacgccgacctgtttctggccgccaagaacctgtccgacgccatcctgctgagcgacatcctgagagtgaacaccgagatcaccaaggcccccctgagcgcctctatgatcaagagatacgacgagcaccaccaggacctgaccctgctgaaagctctcgtgcggcagcagctgcctgagaagtacaaagagattttcttcgaccagagcaagaacggctacgccggctacattgacggcggagccagccaggaagagttctacaagttcatcaagcccatcctggaaaagatggacggcaccgaggaactgctcgtgaagctgaacagagaggacctgctgcggaagcagcggaccttcgacaacggcagcatcccccaccagatccacctgggagagctgcacgccattctgcggcggcaggaagatttttacccattcctgaaggacaaccgggaaaagatcgagaagatcctgaccttccgcatcccctactacgtgggccctctggccaggggaaacagcagattcgcctggatgaccagaaagagcgaggaaaccatcaccccctggaacttcgaggaagtggtggacaagggcgcttccgcccagagcttcatcgagcggatgaccaacttcgataagaacctgcccaacgagaaggtgctgcccaagcacagcctgctgtacgagtacttcaccgtgtataacgagctgaccaaagtgaaatacgtgaccgagggaatgagaaagcccgccttcctgagcggcgagcagaaaaaggccatcgtggacctgctgttcaagaccaaccggaaagtgaccgtgaagcagctgaaagaggactacttcaagaaaatcgagtgcttcgactccgtggaaatctccggcgtggaagatcggttcaacgcctccctgggcacataccacgatctgctgaaaattatcaaggacaaggacttcctggacaatgaggaaaacgaggacattctggaagatatcgtgctgaccctgacactgtttgaggacagagagatgatcgaggaacggctgaaaacctatgcccacctgttcgacgacaaagtgatgaagcagctgaagcggcggagatacaccggctggggcaggctgagccggaagctgatcaacggcatccgggacaagcagtccggcaagacaatcctggatttcctgaagtccgacggcttcgccaacagaaacttcatgcagctgatccacgacgacagcctgacctttaaagaggacatccagaaagcccaggtgtccggccagggcgatagcctgcacgagcacattgccaatctggccggcagccccgccattaagaagggcatcctgcagacagtgaaggtggtggacgagctcgtgaaagtgatgggccggcacaagcccgagaacatcgtgatcgaaatggccagagagaaccagaccacccagaagggacagaagaacagccgcgagagaatgaagcggatcgaagagggcatcaaagagctgggcagccagatcctgaaagaacaccccgtggaaaacacccagctgcagaacgagaagctgtacctgtactacctgcagaatgggcgggatatgtacgtggaccaggaactggacatcaaccggctgtccgactacgatgtggaccatatcgtgcctcagagctttctggccgacgactccatcgacaacaaggtgctgaccagaagcgacaagaaccggggcaagagcgacaacgtgccctccgaagaggtcgtgaagaagatgaagaactactggcggcagctgctgaacgccaagctgattacccagagaaagttcgacaatctgaccaaggccgagagaggcggcctgagcgaactggataaggccggcttcatcaagagacagctggtggaaacccggcagatcacaaagcacgtggcacagatcctggactcccggatgaacactaagtacgacgagaatgacaagctgatccgggaagtgaaagtgatcaccctgaagtccaagctggtgtccgatttccggaaggatttccagttttacaaagtgcgcgagatcaacaactaccaccacgcccacgacgcctacctgaacgccgtcgtgggaaccgccctgatcaaaaagtaccctgccctggaaagcgagttcgtgtacggcgactacaaggtgtacgacgtgcggaagatgatcgccaagagcgagcaggaaatcggcaaggctaccgccaagtacttcttctacagcaacatcatgaactttttcaagaccgagattaccctggccaacggcgagatccggaaggcccctctgatcgagacaaacggcgaaaccggggagatcgtgtgggataagggccgggattttgccaccgtgcggaaagtgctgagcatgccccaagtgaatatcgtgaaaaagaccgaggtgcagacaggcggcttcagcaaagagtctatcctgcccaagaggaacagcgataagctgatcgccagaaagaaggactgggaccctaagaagtacggcggcttcgacagccccaccgtggcctattctgtgctggtggtggccaaagtggaaaagggcaagtccaagaaactgaagagtgtgaaagagctgctggggatcaccatcatggaaagaagcagcttcgagaagaatcccatcgactttctggaagccaagggctacaaagaagtgaaaaaggacctgatcatcaagctgcctaagtactccctgttcgagctggaaaacggccggaagagaatgctggcctctgccggcgaactgcagaagggaaacgaactggccctgccctccaaatatgtgaacttcctgtacctggccagccactatgagaagctgaagggctcccccgaggataatgagcagaaacagctgtttgtggaacagcacaagcactacctggacgagatcatcgagcagatcagcgagttctccaagagagtgatcctggccgacgctaatctggacaaagtgctgtccgcctacaacaagcaccgggataagcccatcagagagcaggccgagaatatcatccacctgtttaccctgaccaatctgggagcccctgccgccttcaagtactttgacaccaccatcgaccggaagaggtacaccagcaccaaagaggtgctggacgccaccctgatccaccagagcatcaccggcctgtacgagacacggatcgacctgtctcagctgggaggtgac

SEQ ID NO: 142 - DNA, 4101 bp, Artificial sequence
  Synthetic polynucleotide
gacaagaagtacagcatcggcctggccatcggcaccaactctgtgggctgggccgtgatcaccgacgagtacaaggtgcccagcaagaaattcaaggtgctgggcaacaccgaccggcacagcatcaagaagaacctgatcggagccctgctgttcgacagcggcgaaacagccgaggccacccggctgaagagaaccgccagaagaagatacaccagacggaagaaccggatctgctatctgcaagagatcttcagcaacgagatggccaaggtggacgacagcttcttccacagactggaagagtccttcctggtggaagaggataagaagcacgagcggcaccccatcttcggcaacatcgtggacgaggtggcctaccacgagaagtaccccaccatctaccacctgagaaagaaactggtggacagcaccgacaaggccgacctgcggctgatctatctggccctggcccacatgatcaagttccggggccacttcctgatcgagggcgacctgaaccccgacaacagcgacgtggacaagctgttcatccagctggtgcagacctacaaccagctgttcgaggaaaaccccatcaacgccagcggcgtggacgccaaggccatcctgtctgccagactgagcaagagcagacggctggaaaatctgatcgcccagctgcccggcgagaagaagaatggcctgttcggaaacctgattgccctgagcctgggcctgacccccaacttcaagagcaacttcgacctggccgaggatgccaaactgcagctgagcaaggacacctacgacgacgacctggacaacctgctggcccagatcggcgaccagtacgccgacctgtttctggccgccaagaacctgtccgacgccatcctgctgagcgacatcctgagagtgaacaccgagatcaccaaggcccccctgagcgcctctatgatcaagagatacgacgagcaccaccaggacctgaccctgctgaaagctctcgtgcggcagcagctgcctgagaagtacaaagagattttcttcgaccagagcaagaacggctacgccggctacattgacggcggagccagccaggaagagttctacaagttcatcaagcccatcctggaaaagatggacggcaccgaggaactgctcgtgaagctgaacagagaggacctgctgcggaagcagcggaccttcgacaacggcagcatcccccaccagatccacctgggagagctgcacgccattctgcggcggcaggaagatttttacccattcctgaaggacaaccgggaaaagatcgagaagatcctgaccttccgcatcccctactacgtgggccctctggccaggggaaacagcagattcgcctggatgaccagaaagagcgaggaaaccatcaccccctggaacttcgaggaagtggtggacaagggcgcttccgcccagagcttcatcgagcggatgaccaacttcgataagaacctgcccaacgagaaggtgctgcccaagcacagcctgctgtacgagtacttcaccgtgtataacgagctgaccaaagtgaaatacgtgaccgagggaatgagaaagcccgccttcctgagcggcgagcagaaaaaggccatcgtggacctgctgttcaagaccaaccggaaagtgaccgtgaagcagctgaaagaggactacttcaagaaaatcgagtgcttcgactccgtggaaatctccggcgtggaagatcggttcaacgcctccctgggcacataccacgatctgctgaaaattatcaaggacaaggacttcctggacaatgaggaaaacgaggacattctggaagatatcgtgctgaccctgacactgtttgaggacagagagatgatcgaggaacggctgaaaacctatgcccacctgttcgacgacaaagtgatgaagcagctgaagcggcggagatacaccggctggggcaggctgagccggaagctgatcaacggcatccgggacaagcagtccggcaagacaatcctggatttcctgaagtccgacggcttcgccaacagaaacttcatgcagctgatccacgacgacagcctgacctttaaagaggacatccagaaagcccaggtgtccggccagggcgatagcctgcacgagcacattgccaatctggccggcagccccgccattaagaagggcatcctgcagacagtgaaggtggtggacgagctcgtgaaagtgatgggccggcacaagcccgagaacatcgtgatcgaaatggccagagagaaccagaccacccagaagggacagaagaacagccgcgagagaatgaagcggatcgaagagggcatcaaagagctgggcagccagatcctgaaagaacaccccgtggaaaacacccagctgcagaacgagaagctgtacctgtactacctgcagaatgggcgggatatgtacgtggaccaggaactggacatcaaccggctgtccgactacgatgtggaccatatcgtgcctcagagctttctgaaggacgactccatcgacaacaaggtgctgaccagaagcgacaagaaccggggcaagagcgacaacgtgccctccgaagaggtcgtgaagaagatgaagaactactggcggcagctgctgaacgccaagctgattacccagagaaagttcgacaatctgaccaaggccgagagaggcggcctgagcgaactggataaggccggcttcatcaagagacagctggtggaaacccggcagatcacaaagcacgtggcacagatcctggactcccggatgaacactaagtacgacgagaatgacaagctgatccgggaagtgaaagtgatcaccctgaagtccaagctggtgtccgatttccggaaggatttccagttttacaaagtgcgcgagatcaacaactaccaccacgcccacgacgcctacctgaacgccgtcgtgggaaccgccctgatcaaaaagtaccctaagctggaaagcgagttcgtgtacggcgactacaaggtgtacgacgtgcggaagatgatcgccaagagcgagcaggaaatcggcaaggctaccgccaagtacttcttctacagcaacatcatgaactttttcaagaccgagattaccctggccaacggcgagatccggaagcggcctctgatcgagacaaacggcgaaaccggggagatcgtgtgggataagggccgggattttgccaccgtgcggaaagtgctgagcatgccccaagtgaatatcgtgaaaaagaccgaggtgcagacaggcggcttcagcaaagagtctatcctgcccaagaggaacagcgataagctgatcgccagaaagaaggactgggaccctaagaagtacggcggcttcgacagccccaccgtggcctattctgtgctggtggtggccaaagtggaaaagggcaagtccaagaaactgaagagtgtgaaagagctgctggggatcaccatcatggaaagaagcagcttcgagaagaatcccatcgactttctggaagccaagggctacaaagaagtgaaaaaggacctgatcatcaagctgcctaagtactccctgttcgagctggaaaacggccggaagagaatgctggcctctgccggcgaactgcagaagggaaacgaactggccctgccctccaaatatgtgaacttcctgtacctggccagccactatgagaagctgaagggctcccccgaggataatgagcagaaacagctgtttgtggaacagcacaagcactacctggacgagatcatcgagcagatcagcgagttctccaagagagtgatcctggccgacgctaatctggacaaagtgctgtccgcctacaacaagcaccgggataagcccatcagagagcaggccgagaatatcatccacctgtttaccctgaccaatctgggagcccctgccgccttcaagtactttgacaccaccatcgaccggaagaggtacaccagcaccaaagaggtgctggacgccaccctgatccaccagagcatcaccggcctgtacgagacacggatcgacctgtctcagctgggaggtgac

SEQ ID NO: 143 - DNA, 4101 bp, Artificial sequence
  Synthetic polynucleotide
gacaagaagtacagcatcggcctggacatcggcaccaactctgtgggctgggccgtgatcaccgacgagtacaaggtgcccagcaagaaattcaaggtgctgggcaacaccgaccggcacagcatcaagaagaacctgatcggagccctgctgttcgacagcggcgaaacagccgaggccacccggctgaagagaaccgccagaagaagatacaccagacggaagaaccggatctgctatctgcaagagatcttcagcaacgagatggccaaggtggacgacagcttcttccacagactggaagagtccttcctggtggaagaggataagaagcacgagcggcaccccatcttcggcaacatcgtggacgaggtggcctaccacgagaagtaccccaccatctaccacctgagaaagaaactggtggacagcaccgacaaggccgacctgcggctgatctatctggccctggcccacatgatcaagttccggggccacttcctgatcgagggcgacctgaaccccgacaacagcgacgtggacaagctgttcatccagctggtgcagacctacaaccagctgttcgaggaaaaccccatcaacgccagcggcgtggacgccaaggccatcctgtctgccagactgagcaagagcagacggctggaaaatctgatcgcccagctgcccggcgagaagaagaatggcctgttcggaaacctgattgccctgagcctgggcctgacccccaacttcaagagcaacttcgacctggccgaggatgccaaactgcagctgagcaaggacacctacgacgacgacctggacaacctgctggcccagatcggcgaccagtacgccgacctgtttctggccgccaagaacctgtccgacgccatcctgctgagcgacatcctgagagtgaacaccgagatcaccaaggcccccctgagcgcctctatgatcaagagatacgacgagcaccaccaggacctgaccctgctgaaagctctcgtgcggcagcagctgcctgagaagtacaaagagattttcttcgaccagagcaagaacggctacgccggctacattgacggcggagccagccaggaagagttctacaagttcatcaagcccatcctggaaaagatggacggcaccgaggaactgctcgtgaagctgaacagagaggacctgctgcggaagcagcggaccttcgacaacggcagcatcccccaccagatccacctgggagagctgcacgccattctgcggcggcaggaagatttttacccattcctgaaggacaaccgggaaaagatcgagaagatcctgaccttccgcatcccctactacgtgggccctctggccaggggaaacagcagattcgcctggatgaccagaaagagcgaggaaaccatcaccccctggaacttcgaggaagtggtggacaagggcgcttccgcccagagcttcatcgagcggatgaccaacttcgataagaacctgcccaacgagaaggtgctgcccaagcacagcctgctgtacgagtacttcaccgtgtataacgagctgaccaaagtgaaatacgtgaccgagggaatgagaaagcccgccttcctgagcggcgagcagaaaaaggccatcgtggacctgctgttcaagaccaaccggaaagtgaccgtgaagcagctgaaagaggactacttcaagaaaatcgagtgcttcgactccgtggaaatctccggcgtggaagatcggttcaacgcctccctgggcacataccacgatctgctgaaaattatcaaggacaaggacttcctggacaatgaggaaaacgaggacattctggaagatatcgtgctgaccctgacactgtttgaggacagagagatgatcgaggaacggctgaaaacctatgcccacctgttcgacgacaaagtgatgaagcagctgaagcggcggagatacaccggctggggcaggctgagccggaagctgatcaacggcatccgggacaagcagtccggcaagacaatcctggatttcctgaagtccgacggcttcgccaacagaaacttcatgcagctgatccacgacgacagcctgacctttaaagaggacatccagaaagcccaggtgtccggccagggcgatagcctgcacgagcacattgccaatctggccggcagccccgccattaagaagggcatcctgcagacagtgaaggtggtggacgagctcgtgaaagtgatgggccggcacaagcccgagaacatcgtgatcgaaatggccagagagaaccagaccacccagaagggacagaagaacagccgcgagagaatgaagcggatcgaagagggcatcaaagagctgggcagccagatcctgaaagaacaccccgtggaaaacacccagctgcagaacgagaagctgtacctgtactacctgcagaatgggcgggatatgtacgtggaccaggaactggacatcaaccggctgtccgactacgatgtggacgccatcgtgcctcagagctttctgaaggacgactccatcgacaacaaggtgctgaccagaagcgacaagaaccggggcaagagcgacaacgtgccctccgaagaggtcgtgaagaagatgaagaactactggcggcagctgctgaacgccaagctgattacccagagaaagttcgacaatctgaccaaggccgagagaggcggcctgagcgaactggataaggccggcttcatcaagagacagctggtggaaacccggcagatcacaaagcacgtggcacagatcctggactcccggatgaacactaagtacgacgagaatgacaagctgatccgggaagtgaaagtgatcaccctgaagtccaagctggtgtccgatttccggaaggatttccagttttacaaagtgcgcgagatcaacaactaccaccacgcccacgacgcctacctgaacgccgtcgtgggaaccgccctgatcaaaaagtaccctaagctggaaagcgagttcgtgtacggcgactacaaggtgtacgacgtgcggaagatgatcgccaagagcgagcaggaaatcggcaaggctaccgccaagtacttcttctacagcaacatcatgaactttttcaagaccgagattaccctggccaacggcgagatccggaagcggcctctgatcgagacaaacggcgaaaccggggagatcgtgtgggataagggccgggattttgccaccgtgcggaaagtgctgagcatgccccaagtgaatatcgtgaaaaagaccgaggtgcagacaggcggcttcagcaaagagtctatcctgcccaagaggaacagcgataagctgatcgccagaaagaaggactgggaccctaagaagtacggcggcttcgacagccccaccgtggcctattctgtgctggtggtggccaaagtggaaaagggcaagtccaagaaactgaagagtgtgaaagagctgctggggatcaccatcatggaaagaagcagcttcgagaagaatcccatcgactttctggaagccaagggctacaaagaagtgaaaaaggacctgatcatcaagctgcctaagtactccctgttcgagctggaaaacggccggaagagaatgctggcctctgccggcgaactgcagaagggaaacgaactggccctgccctccaaatatgtgaacttcctgtacctggccagccactatgagaagctgaagggctcccccgaggataatgagcagaaacagctgtttgtggaacagcacaagcactacctggacgagatcatcgagcagatcagcgagttctccaagagagtgatcctggccgacgctaatctggacaaagtgctgtccgcctacaacaagcaccgggataagcccatcagagagcaggccgagaatatcatccacctgtttaccctgaccaatctgggagcccctgccgccttcaagtactttgacaccaccatcgaccggaagaggtacaccagcaccaaagaggtgctggacgccaccctgatccaccagagcatcaccggcctgtacgagacacggatcgacctgtctcagctgggaggtgac

SEQ ID NO: 144 - DNA, 23 bp, Artificial sequence
  Synthetic oligonucleotide
accttggagacggcgactctctg

SEQ ID NO: 145 - DNA, 23 bp, Artificial sequence
  Synthetic oligonucleotide
gcggatgttccaatcagtacgca

SEQ ID NO: 146 - DNA, 23 bp, Artificial sequence
  Synthetic oligonucleotide
tgtcaccaatcctgtccctagtg

SEQ ID NO: 147 - DNA, 23 bp, Artificial sequence
  Synthetic oligonucleotide
tctgtcccctccaccccacagtg

SEQ ID NO: 148 - DNA, 23 bp, Artificial sequence
  Synthetic oligonucleotide
tatgagttacaacgaacacctca

SEQ ID NO: 149 - DNA, 23 bp, Artificial sequence
  Synthetic oligonucleotide
cacgtctcatatgccccttggca

SEQ ID NO: 150 - RNA, 23 nt, Artificial sequence
  Synthetic oligonucleotide
ugucaccaauccugucccuagug

SEQ ID NO: 151 - protein, 1129 aa, Alicyclobacillus acidoterrestris
MAVKSIKVKLRLDDMPEIRAGLWKLHKEVNAGVRYYTEWLSLLRQENLYRRSPNGDGEQECDKTAEECKAELLERLRARQVENGHRGPAGSDDELLQLARQLYELLVPQAIGAKGDAQQIARKFLSPLADKDAVGGLGIAKAGNKPRWVRMREAGEPGWEEEKEKAETRKSADRTADVLRALADFGLKPLMRVYTDSEMSSVEWKPLRKGQAVRTWDRDMFQQAIERMMSWESWNQRVGQEYAKLVEQKNRFEQKNFVGQEHLVHLVNQLQQDMKEASPGLESKEQTAHYVTGRALRGSDKVFEKWGKLAPDAPFDLYDAEIKNVQRRNTRRFGSHDLFAKLAEPEYQALWREDASFLTRYAVYNSILRKLNHAKMFATFTLPDATAHPIWTRFDKLGGNLHQYTFLFNEFGERRHAIRFHKLLKVENGVAREVDDVTVPISMSEQLDNLLPRDPNEPIALYFRDYGAEQHFTGEFGGAKIQCRRDQLAHMHRRRGARDVYLNVSVRVQSQSEARGERRPPYAAVFRLVGDNHRAFVHFDKLSDYLAEHPDDGKLGSEGLLSGLRVMSVDLGLRTSASISVFRVARKDELKPNSKGRVPFFFPIKGNDNLVAVHERSQLLKLPGETESKDLRAIREERQRTLRQLRTQLAYLRLLVRCGSEDVGRRERSWAKLIEQPVDAANHMTPDWREAFENELQKLKSLHGICSDKEWMDAVYESVRRVWRHMGKQVRDWRKDVRSGERPKIRGYAKDVVGGNSIEQIEYLERQYKFLKSWSFFGKVSGQVIRAEKGSRFAITLREHIDHAKEDRLKKLADRIIMEALGYVYALDERGKGKWVAKYPPCQLILLEELSEYQFNNDRPPSENNQLMQWSHRGVFQELINQAQVHDLLVGTMYAAFSSRFDARTGAPGIRCRRVPARCTQEHNPEPFPWWLNKFVVEHTLDACPLRADDLIPTGEGEIFVSPFSAEEGDFHQIHADLNAAQNLQQRLWSDFDISQIRLRCDWGEVDGELVLIPRLTGKRTADSYSNKVFYTNTGVTYYERERGKKRRKVFAQEKLSEEEAELLVEADEAREKSVVLMRDPSGIINRGNWTRQKEFWSMVNQRIEGYLVKQIRSRVPLQDSACENTGDI

SEQ ID NO: 152 - protein, 198 aa, Artificial sequence
  Synthetic polypeptide
EASPASGPRHLMDPHIFTSNFNNGIGRHKTYLCYEVERLDNGTSVKMDQHRGFLHNQAKNLLCGFYGRHAELRFLDLVPSLQLDPAQIYRVTWFISWSPCFSWGCAGEVRAFLQENTHVRLRIFAARIYDYDPLYKEALQMLRDAGAQVSIMTYDEFKHCWDTFVDHQGCPFQPWDGLDEHSQALSGRLRAILQNQGN

SEQ ID NO: 153 - protein, 17 aa, Artificial sequence
  Synthetic peptide
SGSETPGTSESATPESM

SEQ ID NO: 154 - protein, 13 aa, Artificial sequence
  Synthetic peptide
GSPKKKRKVSGGS

SEQ ID NO: 155 - protein, 166 aa, Artificial sequence
  Synthetic polypeptide
SEVEFSHEYWMRHALTLAKRARDEREVPVGAVLVLNNRVIGEGWNRAIGLHDPTAHAEIMALRQGGLVMQNYRLIDATLYVTFEPCVMCAGAMIHSRIGRVVFGVRNSKRGAAGSLMNVLNYPGMNHRVEITEGILADECAALLCDFYRMPRQVFNAQKKAQSSIN

SEQ ID NO: 156 - protein, 397 aa, Artificial sequence
  Synthetic polypeptide
GSSETPGTSESATPEGGSGGSGSEASPASGPRHLMDPHIFTSNFNNGIGRHKTYLCYEVERLDNGTSVKMDQHRGFLHNQAKNLLCGFYGRHAELRFLDLVPSLQLDPAQIYRVTWFISWSPCFSWGCAGEVRAFLQENTHVRLRIFAARIYDYDPLYKEALQMLRDAGAQVSIMTYDEFKHCWDTFVDHQGCPFQPWDGLDEHSQALSGRLRAILQNQGNGGGGSTNLSDIIEKETGKQLVIQESILMLPEEVEEVIGNKPESDILVHTAYDESTDENVMLLTSDAPEYKPWALVIQDSNGENKIKMLSGGSGGSGGSYKLILNGKTLKGETTTEAVDAATAEKVFKQYANDNGVDGEWTYDDATKTFTVTESGGSKRTADGSEFEPKKKRKVGSG

SEQ ID NO: 157 - protein, 1787 aa, Artificial sequence
  Synthetic polypeptide
MKRTADGSEFESPKKKRKVSKLEKFTNCYSLSKTLRFKAIPVGKTQENIDNKRLLVEDEKRAEDYKGVKKLLDRYYLSFINDVLHSIKLKNLNNYISLFRKKTRTEKENKELENLEINLRKEIAKAFKGNEGYKSLFKKDIIETILPEFLDDKDEIALVNSFNGFTTAFTGFFDNRENMFSEEAKSTSIAFRCINENLTRYISNMDIFEKVDAIFDKHEVQEIKEKILNSDYDVEDFFEGEFFNFVLTQEGIDVYNAIIGGFVTESGEKIKGLNEYINLYNQKTKQKLPKFKPLYKQVLSDRESLSFYGEGSSGENQTTQKGQKNSRERMKRIEEGIKELGSQILKEHPVENTQLQNEKLYLYYLQNGRDMYVDQELDINRLSDYDVDHIVPQSFLKDDSIDNKVLTRSDKNRGKSDNVPSEEVVKKMKNYWRQLLNAKLITQRKFDNLTKAERGGLSGYTSDEEVLEVFRNTLNKNSEIFSSIKKLEKLFKNFDEYSSAGIFVKNGPAISTISKDIFGEWNVIRDKWNAEYDDIHLKKKAVVTEKYEDDRRKSFKKIGSFSLEQLQEYADADLSVVEKLKEIIIQKVDEIYKVYGSSEKLFDADFVLEKSLKKNDAVVAIMKDLLDSVKSFENYIKAFFGEGKETNRDESFYGDFVLAYDILLKVDHIYDAIRNYVTQKPYSKDKFKLYFQNPQFMGGWDKDKETDYRATILRYGSKYYLAIMDKKYAKCLQKIDKDDVNGNYEKINYKLLPGPNKMLPKVFFSKKWMAYYNPSEDIQKIYKNGTFKKGDMFNLNDCHKLIDFFKDSISRYPKWSNAYDFNFSETEKYKDIAGFYREVEEQGYKVSFESASKKEVDKLVEEGKLYMFQIYNKDFSDKSHGTPNLHTMYFKLLFDENNHGQIRLSGGAELFMRRASLKKEELVVHPANSPIANKNPDNPKKTTTLSYDVYKDKRFSEDQYELHIPIAINKCPKNIFKINTEVRVLLKHDDNPYVIGIARGERNLLYIVVVDGKGNIVEQYSLNEIINNFNGIRIKTDYHSLLDKKEKERFEARQNWTSIENIKELKAGYISQVVHKICELVEKYDAVIALEDLNSGFKNSRVKVEKQVYQKFEKMLIDKLNYMVDKKSNPCATGGALKGYQITNKFESFKSMSTQNGFIFYIPAWLTSKIDPSTGFVNLLKTKYTSIADSKKFISSFDRIMYVPEEDLFEFALDYKNFSRTDADYIKKWKLYSYGNRIRIFRNPKKNNVFDWEEVCLTSAYKELFNKYGINYQQGDIRALLCEQSDKAFYSSFMALMSLMLQMRNSITGRTDVDFLISPVKNSDGIFYDSRNYEAQENAILPKNADANGAYNIARKVLWAIGQFKKAEDEKLDKVKIAISNKEWLEYAQTSVKHGGGGSGGGGSGGGGSGPKKKRKVAAAGSEELLSKNYHLENEVARLKKGSGSGGSGSGGSGSGSGGSGSGGSGSGEELLSKNYHLENEVARLKKGSGSGGSGSGGSGSGSGGSGSGGSGSGEELLSKNYHLENEVARLKKGSGSGGSGSGGSGSGSGGSGSGGSGSGEELLSKNYHLENEVARLKKGSGSGGSGSGGSGSGSGGSGSGGSGSGEELLSKNYHLENEVARLKKGSGSGGSGSGGSGSGSGGSGSGGSGSGEELLSKNYHLENEVARLKKGSGSGGSGSGGSGSGSGGSGSGGSGSGEELLSKNYHLENEVARLKKGSGSGGSGSGGSGSGSGGSGSGGSGSGEELLSKNYHLENEVARLKKSGGSKRTADGSEFEPKKKRKVGSG

SEQ ID NO: 158 - protein, 1787 aa, Artificial sequence
  Synthetic polypeptide
MKRTADGSEFESPKKKRKVSKLEKFTNCYSLSKTLRFKAIPVGKTQENIDNKRLLVEDEKRAEDYKGVKKLLDRYYLSFINDVLHSIKLKNLNNYISLFRKKTRTEKENKELENLEINLRKEIAKAFKGNEGYKSLFKKDIIETILPEFLDDKDEIALVNSFNGFTTAFTGFFDNRENMFSEEAKSTSIAFRCINENLTRYISNMDIFEKVDAIFDKHEVQEIKEKILNSDYDVEDFFEGEFFNFVLTQEGIDVYNAIIGGFVTESGEKIKGLNEYINLYNQKTKQKLPKFKPLYKQVLSDRESLSFYGGSSGENQTTQKGQKNSRERMKRIEEGIKELGSQILKEHPVENTQLQNEKLYLYYLQNGRDMYVDQELDINRLSDYDVDHIVPQSFLKDDSIDNKVLTRSDKNRGKSDNVPSEEVVKKMKNYWRQLLNAKLITQRKFDNLTKAERGGLSEGYTSDEEVLEVFRNTLNKNSEIFSSIKKLEKLFKNFDEYSSAGIFVKNGPAISTISKDIFGEWNVIRDKWNAEYDDIHLKKKAVVTEKYEDDRRKSFKKIGSFSLEQLQEYADADLSVVEKLKEIIIQKVDEIYKVYGSSEKLFDADFVLEKSLKKNDAVVAIMKDLLDSVKSFENYIKAFFGEGKETNRDESFYGDFVLAYDILLKVDHIYDAIRNYVTQKPYSKDKFKLYFQNPQFMGGWDKDKETDYRATILRYGSKYYLAIMDKKYAKCLQKIDKDDVNGNYEKINYKLLPGPNKMLPKVFFSKKWMAYYNPSEDIQKIYKNGTFKKGDMFNLNDCHKLIDFFKDSISRYPKWSNAYDFNFSETEKYKDIAGFYREVEEQGYKVSFESASKKEVDKLVEEGKLYMFQIYNKDFSDKSHGTPNLHTMYFKLLFDENNHGQIRLSGGAELFMRRASLKKEELVVHPANSPIANKNPDNPKKTTTLSYDVYKDKRFSEDQYELHIPIAINKCPKNIFKINTEVRVLLKHDDNPYVIGIARGERNLLYIVVVDGKGNIVEQYSLNEIINNFNGIRIKTDYHSLLDKKEKERFEARQNWTSIENIKELKAGYISQVVHKICELVEKYDAVIALEDLNSGFKNSRVKVEKQVYQKFEKMLIDKLNYMVDKKSNPCATGGALKGYQITNKFESFKSMSTQNGFIFYIPAWLTSKIDPSTGFVNLLKTKYTSIADSKKFISSFDRIMYVPEEDLFEFALDYKNFSRTDADYIKKWKLYSYGNRIRIFRNPKKNNVFDWEEVCLTSAYKELFNKYGINYQQGDIRALLCEQSDKAFYSSFMALMSLMLQMRNSITGRTDVDFLISPVKNSDGIFYDSRNYEAQENAILPKNADANGAYNIARKVLWAIGQFKKAEDEKLDKVKIAISNKEWLEYAQTSVKHGGGGSGGGGSGGGGSGPKKKRKVAAAGSEELLSKNYHLENEVARLKKGSGSGGSGSGGSGSGSGGSGSGGSGSGEELLSKNYHLENEVARLKKGSGSGGSGSGGSGSGSGGSGSGGSGSGEELLSKNYHLENEVARLKKGSGSGGSGSGGSGSGSGGSGSGGSGSGEELLSKNYHLENEVARLKKGSGSGGSGSGGSGSGSGGSGSGGSGSGEELLSKNYHLENEVARLKKGSGSGGSGSGGSGSGSGGSGSGGSGSGEELLSKNYHLENEVARLKKGSGSGGSGSGGSGSGSGGSGSGGSGSGEELLSKNYHLENEVARLKKGSGSGGSGSGGSGSGSGGSGSGGSGSGEELLSKNYHLENEVARLKKSGGSKRTADGSEFEPKKKRKVGSG

SEQ ID NO: 159 - protein, 1789 aa, Artificial sequence
  Synthetic polypeptide
MKRTADGSEFESPKKKRKVSKLEKFTNCYSLSKTLRFKAIPVGKTQENIDNKRLLVEDEKRAEDYKGVKKLLDRYYLSFINDVLHSIKLKNLNNYISLFRKKTRTEKENKELENLEINLRKEIAKAFKGNEGYKSLFKKDIIETILPEFLDDKDEIALVNSFNGFTTAFTGFFDNRENMFSEEAKSTSIAFRCINENLTRYISNMDIFEKVDAIFDKHEVQEIKEKILNSDYDVEDFFEGEFFNFVLTQEGIDVYNAIIGGFVTESGEKIKGLNEYINLYNQKTKQKLPKFKPLYKQVLSDRESLSFYGGSSGENQTTQKGQKNSRERMKRIEEGIKELGSQILKEHPVENTQLQNEKLYLYYLQNGRDMYVDQELDINRLSDYDVDHIVPQSFLKDDSIDNKVLTRSDKNRGKSDNVPSEEVVKKMKNYWRQLLNAKLITQRKFDNLTKAERGGLSGSEGYTSDEEVLEVFRNTLNKNSEIFSSIKKLEKLFKNFDEYSSAGIFVKNGPAISTISKDIFGEWNVIRDKWNAEYDDIHLKKKAVVTEKYEDDRRKSFKKIGSFSLEQLQEYADADLSVVEKLKEIIIQKVDEIYKVYGSSEKLFDADFVLEKSLKKNDAVVAIMKDLLDSVKSFENYIKAFFGEGKETNRDESFYGDFVLAYDILLKVDHIYDAIRNYVTQKPYSKDKFKLYFQNPQFMGGWDKDKETDYRATILRYGSKYYLAIMDKKYAKCLQKIDKDDVNGNYEKINYKLLPGPNKMLPKVFFSKKWMAYYNPSEDIQKIYKNGTFKKGDMFNLNDCHKLIDFFKDSISRYPKWSNAYDFNFSETEKYKDIAGFYREVEEQGYKVSFESASKKEVDKLVEEGKLYMFQIYNKDFSDKSHGTPNLHTMYFKLLFDENNHGQIRLSGGAELFMRRASLKKEELVVHPANSPIANKNPDNPKKTTTLSYDVYKDKRFSEDQYELHIPIAINKCPKNIFKINTEVRVLLKHDDNPYVIGIARGERNLLYIVVVDGKGNIVEQYSLNEIINNFNGIRIKTDYHSLLDKKEKERFEARQNWTSIENIKELKAGYISQVVHKICELVEKYDAVIALEDLNSGFKNSRVKVEKQVYQKFEKMLIDKLNYMVDKKSNPCATGGALKGYQITNKFESFKSMSTQNGFIFYIPAWLTSKIDPSTGFVNLLKTKYTSIADSKKFISSFDRIMYVPEEDLFEFALDYKNFSRTDADYIKKWKLYSYGNRIRIFRNPKKNNVFDWEEVCLTSAYKELFNKYGINYQQGDIRALLCEQSDKAFYSSFMALMSLMLQMRNSITGRTDVDFLISPVKNSDGIFYDSRNYEAQENAILPKNADANGAYNIARKVLWAIGQFKKAEDEKLDKVKIAISNKEWLEYAQTSVKHGGGGSGGGGSGGGGSGPKKKRKVAAAGSEELLSKNYHLENEVARLKKGSGSGGSGSGGSGSGSGGSGSGGSGSGEELLSKNYHLENEVARLKKGSGSGGSGSGGSGSGSGGSGSGGSGSGEELLSKNYHLENEVARLKKGSGSGGSGSGGSGSGSGGSGSGGSGSGEELLSKNYHLENEVARLKKGSGSGGSGSGGSGSGSGGSGSGGSGSGEELLSKNYHLENEVARLKKGSGSGGSGSGGSGSGSGGSGSGGSGSGEELLSKNYHLENEVARLKKGSGSGGSGSGGSGSGSGGSGSGGSGSGEELLSKNYHLENEVARLKKGSGSGGSGSGGSGSGSGGSGSGGSGSGEELLSKNYHLENEVARLKKSGGSKRTADGSEFEPKKKRKVGSG

SEQ ID NO: 160 - protein, 1739 aa, Artificial sequence
  Synthetic polypeptide
MKRTADGSEFESPKKKRKVEASPASGPRHLMDPHIFTSNFNNGIGRHKTYLCYEVERLDNGTSVKMDQHRGFLHNQAKNLLCGFYGRHAELRFLDLVPSLQLDPAQIYRVTWFISWSPCFSWGCAGEVRAFLQENTHVRLRIFAARIYDYDPLYKEALQMLRDAGAQVSIMTYDEFKHCWDTFVDHQGCPFQPWDGLDEHSQALSGRLRAILQNQGNSTSQSDGSSVPADIDQSSDSDQSSSQGQPGSKLEKFTNCYSLSKTLRFKAIPVGKTQENIDNKRLLVEDEKRAEDYKGVKKLLDRYYLSFINDVLHSIKLKNLNNYISLFRKKTRTEKENKELENLEINLRKEIAKAFKGNEGYKSLFKKDIIETILPEFLDDKDEIALVNSFNGFTTAFTGFFDNRENMFSEEAKSTSIAFRCINENLTRYISNMDIFEKVDAIFDKHEVQEIKEKILNSDYDVEDFFEGEFFNFVLTQEGIDVYNAIIGGFVTESGEKIKGLNEYINLYNQKTKQKLPKFKPLYKQVLSDRESLSFYGEGSSGENQTTQKGQKNSRERMKRIEEGIKELGSQILKEHPVENTQLQNEKLYLYYLQNGRDMYVDQELDINRLSDYDVDHIVPQSFLKDDSIDNKVLTRSDKNRGKSDNVPSEEVVKKMKNYWRQLLNAKLITQRKFDNLTKAERGGLSGYTSDEEVLEVFRNTLNKNSEIFSSIKKLEKLFKNFDEYSSAGIFVKNGPAISTISKDIFGEWNVIRDKWNAEYDDIHLKKKAVVTEKYEDDRRKSFKKIGSFSLEQLQEYADADLSVVEKLKEIIIQKVDEIYKVYGSSEKLFDADFVLEKSLKKNDAVVAIMKDLLDSVKSFENYIKAFFGEGKETNRDESFYGDFVLAYDILLKVDHIYDAIRNYVTQKPYSKDKFKLYFQNPQFMGGWDKDKETDYRATILRYGSKYYLAIMDKKYAKCLQKIDKDDVNGNYEKINYKLLPGPNKMLPKVFFSKKWMAYYNPSEDIQKIYKNGTFKKGDMFNLNDCHKLIDFFKDSISRYPKWSNAYDFNFSETEKYKDIAGFYREVEEQGYKVSFESASKKEVDKLVEEGKLYMFQIYNKDFSDKSHGTPNLHTMYFKLLFDENNHGQIRLSGGAELFMRRASLKKEELVVHPANSPIANKNPDNPKKTTTLSYDVYKDKRFSEDQYELHIPIAINKCPKNIFKINTEVRVLLKHDDNPYVIGIARGERNLLYIVVVDGKGNIVEQYSLNEIINNFNGIRIKTDYHSLLDKKEKERFEARQNWTSIENIKELKAGYISQVVHKICELVEKYDAVIALEDLNSGFKNSRVKVEKQVYQKFEKMLIDKLNYMVDKKSNPCATGGALKGYQITNKFESFKSMSTQNGFIFYIPAWLTSKIDPSTGFVNLLKTKYTSIADSKKFISSFDRIMYVPEEDLFEFALDYKNFSRTDADYIKKWKLYSYGNRIRIFRNPKKNNVFDWEEVCLTSAYKELFNKYGINYQQGDIRALLCEQSDKAFYSSFMALMSLMLQMRNSITGRTDVDFLISPVKNSDGIFYDSRNYEAQENAILPKNADANGAYNIARKVLWAIGQFKKAEDEKLDKVKIAISNKEWLEYAQTSVKHSGGSGGSGGSTNLSDIIEKETGKQLVIQESILMLPEEVEEVIGNKPESDILVHTAYDESTDENVMLLTSDAPEYKPWALVIQDSNGENKIKMLSGGSKRTADGSEFEPKKKRKVGSG

SEQ ID NO: 161 - protein, 1739 aa, Artificial sequence
  Synthetic polypeptide
MKRTADGSEFESPKKKRKVEASPASGPRHLMDPHIFTSNFNNGIGRHKTYLCYEVERLDNGTSVKMDQHRGFLHNQAKNLLCGFYGRHAELRFLDLVPSLQLDPAQIYRVTWFISWSPCFSWGCAGEVRAFLQENTHVRLRIFAARIYDYDPLYKEALQMLRDAGAQVSIMTYDEFKHCWDTFVDHQGCPFQPWDGLDEHSQALSGRLRAILQNQGNSTSQSDGSSVPADIDQSSDSDQSSSQGQPGSKLEKFTNCYSLSKTLRFKAIPVGKTQENIDNKRLLVEDEKRAEDYKGVKKLLDRYYLSFINDVLHSIKLKNLNNYISLFRKKTRTEKENKELENLEINLRKEIAKAFKGNEGYKSLFKKDIIETILPEFLDDKDEIALVNSFNGFTTAFTGFFDNRENMFSEEAKSTSIAFRCINENLTRYISNMDIFEKVDAIFDKHEVQEIKEKILNSDYDVEDFFEGEFFNFVLTQEGIDVYNAIIGGFVTESGEKIKGLNEYINLYNQKTKQKLPKFKPLYKQVLSDRESLSFYGGSSGENQTTQKGQKNSRERMKRIEEGIKELGSQILKEHPVENTQLQNEKLYLYYLQNGRDMYVDQELDINRLSDYDVDHIVPQSFLKDDSIDNKVLTRSDKNRGKSDNVPSEEVVKKMKNYWRQLLNAKLITQRKFDNLTKAERGGLSEGYTSDEEVLEVFRNTLNKNSEIFSSIKKLEKLFKNFDEYSSAGIFVKNGPAISTISKDIFGEWNVIRDKWNAEYDDIHLKKKAVVTEKYEDDRRKSFKKIGSFSLEQLQEYADADLSVVEKLKEIIIQKVDEIYKVYGSSEKLFDADFVLEKSLKKNDAVVAIMKDLLDSVKSFENYIKAFFGEGKETNRDESFYGDFVLAYDILLKVDHIYDAIRNYVTQKPYSKDKFKLYFQNPQFMGGWDKDKETDYRATILRYGSKYYLAIMDKKYAKCLQKIDKDDVNGNYEKINYKLLPGPNKMLPKVFFSKKWMAYYNPSEDIQKIYKNGTFKKGDMFNLNDCHKLIDFFKDSISRYPKWSNAYDFNFSETEKYKDIAGFYREVEEQGYKVSFESASKKEVDKLVEEGKLYMFQIYNKDFSDKSHGTPNLHTMYFKLLFDENNHGQIRLSGGAELFMRRASLKKEELVVHPANSPIANKNPDNPKKTTTLSYDVYKDKRFSEDQYELHIPIAINKCPKNIFKINTEVRVLLKHDDNPYVIGIARGERNLLYIVVVDGKGNIVEQYSLNEIINNFNGIRIKTDYHSLLDKKEKERFEARQNWTSIENIKELKAGYISQVVHKICELVEKYDAVIALEDLNSGFKNSRVKVEKQVYQKFEKMLIDKLNYMVDKKSNPCATGGALKGYQITNKFESFKSMSTQNGFIFYIPAWLTSKIDPSTGFVNLLKTKYTSIADSKKFISSFDRIMYVPEEDLFEFALDYKNFSRTDADYIKKWKLYSYGNRIRIFRNPKKNNVFDWEEVCLTSAYKELFNKYGINYQQGDIRALLCEQSDKAFYSSFMALMSLMLQMRNSITGRTDVDFLISPVKNSDGIFYDSRNYEAQENAILPKNADANGAYNIARKVLWAIGQFKKAEDEKLDKVKIAISNKEWLEYAQTSVKHSGGSGGSGGSTNLSDIIEKETGKQLVIQESILMLPEEVEEVIGNKPESDILVHTAYDESTDENVMLLTSDAPEYKPWALVIQDSNGENKIKMLSGGSKRTADGSEFEPKKKRKVGSG

SEQ ID NO: 162 - protein, 1741 aa, Artificial sequence
  Synthetic polypeptide
MKRTADGSEFESPKKKRKVEASPASGPRHLMDPHIFTSNFNNGIGRHKTYLCYEVERLDNGTSVKMDQHRGFLHNQAKNLLCGFYGRHAELRFLDLVPSLQLDPAQIYRVTWFISWSPCFSWGCAGEVRAFLQENTHVRLRIFAARIYDYDPLYKEALQMLRDAGAQVSIMTYDEFKHCWDTFVDHQGCPFQPWDGLDEHSQALSGRLRAILQNQGNSTSQSDGSSVPADIDQSSDSDQSSSQGQPGSKLEKFTNCYSLSKTLRFKAIPVGKTQENIDNKRLLVEDEKRAEDYKGVKKLLDRYYLSFINDVLHSIKLKNLNNYISLFRKKTRTEKENKELENLEINLRKEIAKAFKGNEGYKSLFKKDIIETILPEFLDDKDEIALVNSFNGFTTAFTGFFDNRENMFSEEAKSTSIAFRCINENLTRYISNMDIFEKVDAIFDKHEVQEIKEKILNSDYDVEDFFEGEFFNFVLTQEGIDVYNAIIGGFVTESGEKIKGLNEYINLYNQKTKQKLPKFKPLYKQVLSDRESLSFYGGSSGENQTTQKGQKNSRERMKRIEEGIKELGSQILKEHPVENTQLQNEKLYLYYLQNGRDMYVDQELDINRLSDYDVDHIVPQSFLKDDSIDNKVLTRSDKNRGKSDNVPSEEVVKKMKNYWRQLLNAKLITQRKFDNLTKAERGGLSGSEGYTSDEEVLEVFRNTLNKNSEIFSSIKKLEKLFKNFDEYSSAGIFVKNGPAISTISKDIFGEWNVIRDKWNAEYDDIHLKKKAVVTEKYEDDRRKSFKKIGSFSLEQLQEYADADLSVVEKLKEIIIQKVDEIYKVYGSSEKLFDADFVLEKSLKKNDAVVAIMKDLLDSVKSFENYIKAFFGEGKETNRDESFYGDFVLAYDILLKVDHIYDAIRNYVTQKPYSKDKFKLYFQNPQFMGGWDKDKETDYRATILRYGSKYYLAIMDKKYAKCLQKIDKDDVNGNYEKINYKLLPGPNKMLPKVFFSKKWMAYYNPSEDIQKIYKNGTFKKGDMFNLNDCHKLIDFFKDSISRYPKWSNAYDFNFSETEKYKDIAGFYREVEEQGYKVSFESASKKEVDKLVEEGKLYMFQIYNKDFSDKSHGTPNLHTMYFKLLFDENNHGQIRLSGGAELFMRRASLKKEELVVHPANSPIANKNPDNPKKTTTLSYDVYKDKRFSEDQYELHIPIAINKCPKNIFKINTEVRVLLKHDDNPYVIGIARGERNLLYIVVVDGKGNIVEQYSLNEIINNFNGIRIKTDYHSLLDKKEKERFEARQNWTSIENIKELKAGYISQVVHKICELVEKYDAVIALEDLNSGFKNSRVKVEKQVYQKFEKMLIDKLNYMVDKKSNPCATGGALKGYQITNKFESFKSMSTQNGFIFYIPAWLTSKIDPSTGFVNLLKTKYTSIADSKKFISSFDRIMYVPEEDLFEFALDYKNFSRTDADYIKKWKLYSYGNRIRIFRNPKKNNVFDWEEVCLTSAYKELFNKYGINYQQGDIRALLCEQSDKAFYSSFMALMSLMLQMRNSITGRTDVDFLISPVKNSDGIFYDSRNYEAQENAILPKNADANGAYNIARKVLWAIGQFKKAEDEKLDKVKIAISNKEWLEYAQTSVKHSGGSGGSGGSTNLSDIIEKETGKQLVIQESILMLPEEVEEVIGNKPESDILVHTAYDESTDENVMLLTSDAPEYKPWALVIQDSNGENKIKMLSGGSKRTADGSEFEPKKKRKVGSG

SEQ ID NO: 163 - protein, 1734 aa, Artificial sequence
  Synthetic polypeptide
MKRTADGSEFESPKKKRKVMEASPASGPRHLMDPHIFTSNFNNGIGRHKTYLCYEVERLDNGTSVKMDQHRGFLHNQAKNLLCGFYGRHAELRFLDLVPSLQLDPAQIYRVTWFISWSPCFSWGCAGEVRAFLQENTHVRLRIFAARIYDYDPLYKEALQMLRDAGAQVSIMTYDEFKHCWDTFVDHQGCPFQPWDGLDEHSQALSGRLRAILQNQGNSGSETPGTSESATPESMSKLEKFTNCYSLSKTLRFKAIPVGKTQENIDNKRLLVEDEKRAEDYKGVKKLLDRYYLSFINDVLHSIKLKNLNNYISLFRKKTRTEKENKELENLEINLRKEIAKAFKGNEGYKSLFKKDIIETILPEFLDDKDEIALVNSFNGFTTAFTGFFDNRENMFSEEAKSTSIAFRCINENLTRYISNMDIFEKVDAIFDKHEVQEIKEKILNSDYDVEDFFEGEFFNFVLTQEGIDVYNAIIGGFVTESGEKIKGLNEYINLYNQKTKQKLPKFKPLYKQVLSDRESLSFYGEGSSGENQTTQKGQKNSRERMKRIEEGIKELGSQILKEHPVENTQLQNEKLYLYYLQNGRDMYVDQELDINRLSDYDVDHIVPQSFLKDDSIDNKVLTRSDKNRGKSDNVPSEEVVKKMKNYWRQLLNAKLITQRKFDNLTKAERGGLSGYTSDEEVLEVFRNTLNKNSEIFSSIKKLEKLFKNFDEYSSAGIFVKNGPAISTISKDIFGEWNVIRDKWNAEYDDIHLKKKAVVTEKYEDDRRKSFKKIGSFSLEQLQEYADADLSVVEKLKEIIIQKVDEIYKVYGSSEKLFDADFVLEKSLKKNDAVVAIMKDLLDSVKSFENYIKAFFGEGKETNRDESFYGDFVLAYDILLKVDHIYDAIRNYVTQKPYSKDKFKLYFQNPQFMGGWDKDKETDYRATILRYGSKYYLAIMDKKYAKCLQKIDKDDVNGNYEKINYKLLPGPNKMLPKVFFSKKWMAYYNPSEDIQKIYKNGTFKKGDMFNLNDCHKLIDFFKDSISRYPKWSNAYDFNFSETEKYKDIAGFYREVEEQGYKVSFESASKKEVDKLVEEGKLYMFQIYNKDFSDKSHGTPNLHTMYFKLLFDENNHGQIRLSGGAELFMRRASLKKEELVVHPANSPIANKNPDNPKKTTTLSYDVYKDKRFSEDQYELHIPIAINKCPKNIFKINTEVRVLLKHDDNPYVIGIARGERNLLYIVVVDGKGNIVEQYSLNEIINNFNGIRIKTDYHSLLDKKEKERFEARQNWTSIENIKELKAGYISQVVHKICELVEKYDAVIALEDLNSGFKNSRVKVEKQVYQKFEKMLIDKLNYMVDKKSNPCATGGALKGYQITNKFESFKSMSTQNGFIFYIPAWLTSKIDPSTGFVNLLKTKYTSIADSKKFISSFDRIMYVPEEDLFEFALDYKNFSRTDADYIKKWKLYSYGNRIRIFRNPKKNNVFDWEEVCLTSAYKELFNKYGINYQQGDIRALLCEQSDKAFYSSFMALMSLMLQMRNSITGRTDVDFLISPVKNSDGIFYDSRNYEAQENAILPKNADANGAYNIARKVLWAIGQFKKAEDEKLDKVKIAISNKEWLEYAQTSVKHGSPKKKRKVSGGSTNLSDIIEKETGKQLVIQESILMLPEEVEEVIGNKPESDILVHTAYDESTDENVMLLTSDAPEYKPWALVIQDSNGENKIKMLTKYDSGGSKRTADGSEFEPKKKRKVGSG

SEQ ID NO: 164 - protein, 1734 aa, Artificial sequence
  Synthetic polypeptide
MKRTADGSEFESPKKKRKVMEASPASGPRHLMDPHIFTSNFNNGIGRHKTYLCYEVERLDNGTSVKMDQHRGFLHNQAKNLLCGFYGRHAELRFLDLVPSLQLDPAQIYRVTWFISWSPCFSWGCAGEVRAFLQENTHVRLRIFAARIYDYDPLYKEALQMLRDAGAQVSIMTYDEFKHCWDTFVDHQGCPFQPWDGLDEHSQALSGRLRAILQNQGNSGSETPGTSESATPESMSKLEKFTNCYSLSKTLRFKAIPVGKTQENIDNKRLLVEDEKRAEDYKGVKKLLDRYYLSFINDVLHSIKLKNLNNYISLFRKKTRTEKENKELENLEINLRKEIAKAFKGNEGYKSLFKKDIIETILPEFLDDKDEIALVNSFNGFTTAFTGFFDNRENMFSEEAKSTSIAFRCINENLTRYISNMDIFEKVDAIFDKHEVQEIKEKILNSDYDVEDFFEGEFFNFVLTQEGIDVYNAIIGGFVTESGEKIKGLNEYINLYNQKTKQKLPKFKPLYKQVLSDRESLSFYGGSSGENQTTQKGQKNSRERMKRIEEGIKELGSQILKEHPVENTQLQNEKLYLYYLQNGRDMYVDQELDINRLSDYDVDHIVPQSFLKDDSIDNKVLTRSDKNRGKSDNVPSEEVVKKMKNYWRQLLNAKLITQRKFDNLTKAERGGLSEGYTSDEEVLEVFRNTLNKNSEIFSSIKKLEKLFKNFDEYSSAGIFVKNGPAISTISKDIFGEWNVIRDKWNAEYDDIHLKKKAVVTEKYEDDRRKSFKKIGSFSLEQLQEYADADLSVVEKLKEIIIQKVDEIYKVYGSSEKLFDADFVLEKSLKKNDAVVAIMKDLLDSVKSFENYIKAFFGEGKETNRDESFYGDFVLAYDILLKVDHIYDAIRNYVTQKPYSKDKFKLYFQNPQFMGGWDKDKETDYRATILRYGSKYYLAIMDKKYAKCLQKIDKDDVNGNYEKINYKLLPGPNKMLPKVFFSKKWMAYYNPSEDIQKIYKNGTFKKGDMFNLNDCHKLIDFFKDSISRYPKWSNAYDFNFSETEKYKDIAGFYREVEEQGYKVSFESASKKEVDKLVEEGKLYMFQIYNKDFSDKSHGTPNLHTMYFKLLFDENNHGQIRLSGGAELFMRRASLKKEELVVHPANSPIANKNPDNPKKTTTLSYDVYKDKRFSEDQYELHIPIAINKCPKNIFKINTEVRVLLKHDDNPYVIGIARGERNLLYIVVVDGKGNIVEQYSLNEIINNFNGIRIKTDYHSLLDKKEKERFEARQNWTSIENIKELKAGYISQVVHKICELVEKYDAVIALEDLNSGFKNSRVKVEKQVYQKFEKMLIDKLNYMVDKKSNPCATGGALKGYQITNKFESFKSMSTQNGFIFYIPAWLTSKIDPSTGFVNLLKTKYTSIADSKKFISSFDRIMYVPEEDLFEFALDYKNFSRTDADYIKKWKLYSYGNRIRIFRNPKKNNVFDWEEVCLTSAYKELFNKYGINYQQGDIRALLCEQSDKAFYSSFMALMSLMLQMRNSITGRTDVDFLISPVKNSDGIFYDSRNYEAQENAILPKNADANGAYNIARKVLWAIGQFKKAEDEKLDKVKIAISNKEWLEYAQTSVKHGSPKKKRKVSGGSTNLSDIIEKETGKQLVIQESILMLPEEVEEVIGNKPESDILVHTAYDESTDENVMLLTSDAPEYKPWALVIQDSNGENKIKMLTKYDSGGSKRTADGSEFEPKKKRKVGSG

SEQ ID NO: 165 - protein, 1736 aa, Artificial sequence
  Synthetic polypeptide
MKRTADGSEFESPKKKRKVMEASPASGPRHLMDPHIFTSNFNNGIGRHKTYLCYEVERLDNGTSVKMDQHRGFLHNQAKNLLCGFYGRHAELRFLDLVPSLQLDPAQIYRVTWFISWSPCFSWGCAGEVRAFLQENTHVRLRIFAARIYDYDPLYKEALQMLRDAGAQVSIMTYDEFKHCWDTFVDHQGCPFQPWDGLDEHSQALSGRLRAILQNQGNSGSETPGTSESATPESMSKLEKFTNCYSLSKTLRFKAIPVGKTQENIDNKRLLVEDEKRAEDYKGVKKLLDRYYLSFINDVLHSIKLKNLNNYISLFRKKTRTEKENKELENLEINLRKEIAKAFKGNEGYKSLFKKDIIETILPEFLDDKDEIALVNSFNGFTTAFTGFFDNRENMFSEEAKSTSIAFRCINENLTRYISNMDIFEKVDAIFDKHEVQEIKEKILNSDYDVEDFFEGEFFNFVLTQEGIDVYNAIIGGFVTESGEKIKGLNEYINLYNQKTKQKLPKFKPLYKQVLSDRESLSFYGGSSGENQTTQKGQKNSRERMKRIEEGIKELGSQILKEHPVENTQLQNEKLYLYYLQNGRDMYVDQELDINRLSDYDVDHIVPQSFLKDDSIDNKVLTRSDKNRGKSDNVPSEEVVKKMKNYWRQLLNAKLITQRKFDNLTKAERGGLSGSEGYTSDEEVLEVFRNTLNKNSEIFSSIKKLEKLFKNFDEYSSAGIFVKNGPAISTISKDIFGEWNVIRDKWNAEYDDIHLKKKAVVTEKYEDDRRKSFKKIGSFSLEQLQEYADADLSVVEKLKEIIIQKVDEIYKVYGSSEKLFDADFVLEKSLKKNDAVVAIMKDLLDSVKSFENYIKAFFGEGKETNRDESFYGDFVLAYDILLKVDHIYDAIRNYVTQKPYSKDKFKLYFQNPQFMGGWDKDKETDYRATILRYGSKYYLAIMDKKYAKCLQKIDKDDVNGNYEKINYKLLPGPNKMLPKVFFSKKWMAYYNPSEDIQKIYKNGTFKKGDMFNLNDCHKLIDFFKDSISRYPKWSNAYDFNFSETEKYKDIAGFYREVEEQGYKVSFESASKKEVDKLVEEGKLYMFQIYNKDFSDKSHGTPNLHTMYFKLLFDENNHGQIRLSGGAELFMRRASLKKEELVVHPANSPIANKNPDNPKKTTTLSYDVYKDKRFSEDQYELHIPIAINKCPKNIFKINTEVRVLLKHDDNPYVIGIARGERNLLYIVVVDGKGNIVEQYSLNEIINNFNGIRIKTDYHSLLDKKEKERFEARQNWTSIENIKELKAGYISQVVHKICELVEKYDAVIALEDLNSGFKNSRVKVEKQVYQKFEKMLIDKLNYMVDKKSNPCATGGALKGYQITNKFESFKSMSTQNGFIFYIPAWLTSKIDPSTGFVNLLKTKYTSIADSKKFISSFDRIMYVPEEDLFEFALDYKNFSRTDADYIKKWKLYSYGNRIRIFRNPKKNNVFDWEEVCLTSAYKELFNKYGINYQQGDIRALLCEQSDKAFYSSFMALMSLMLQMRNSITGRTDVDFLISPVKNSDGIFYDSRNYEAQENAILPKNADANGAYNIARKVLWAIGQFKKAEDEKLDKVKIAISNKEWLEYAQTSVKHGSPKKKRKVSGGSTNLSDIIEKETGKQLVIQESILMLPEEVEEVIGNKPESDILVHTAYDESTDENVMLLTSDAPEYKPWALVIQDSNGENKIKMLTKYDSGGSKRTADGSEFEPKKKRKVGSG

SEQ ID NO: 166 - protein, 1616 aa, Artificial sequence
  Synthetic polypeptide
MKRTADGSEFESPKKKRKVSEVEFSHEYWMRHALTLAKRARDEREVPVGAVLVLNNRVIGEGWNRAIGLHDPTAHAEIMALRQGGLVMQNYRLIDATLYVTFEPCVMCAGAMIHSRIGRVVFGVRNSKRGAAGSLMNVLNYPGMNHRVEITEGILADECAALLCDFYRMPRQVFNAQKKAQSSINSGGSSGGSSGSETPGTSESATPESSGGSSGGSSKLEKFTNCYSLSKTLRFKAIPVGKTQENIDNKRLLVEDEKRAEDYKGVKKLLDRYYLSFINDVLHSIKLKNLNNYISLFRKKTRTEKENKELENLEINLRKEIAKAFKGNEGYKSLFKKDIIETILPEFLDDKDEIALVNSFNGFTTAFTGFFDNRENMFSEEAKSTSIAFRCINENLTRYISNMDIFEKVDAIFDKHEVQEIKEKILNSDYDVEDFFEGEFFNFVLTQEGIDVYNAIIGGFVTESGEKIKGLNEYINLYNQKTKQKLPKFKPLYKQVLSDRESLSFYGEGSSGENQTTQKGQKNSRERMKRIEEGIKELGSQILKEHPVENTQLQNEKLYLYYLQNGRDMYVDQELDINRLSDYDVDHIVPQSFLKDDSIDNKVLTRSDKNRGKSDNVPSEEVVKKMKNYWRQLLNAKLITQRKFDNLTKAERGGLSGYTSDEEVLEVFRNTLNKNSEIFSSIKKLEKLFKNFDEYSSAGIFVKNGPAISTISKDIFGEWNVIRDKWNAEYDDIHLKKKAVVTEKYEDDRRKSFKKIGSFSLEQLQEYADADLSVVEKLKEIIIQKVDEIYKVYGSSEKLFDADFVLEKSLKKNDAVVAIMKDLLDSVKSFENYIKAFFGEGKETNRDESFYGDFVLAYDILLKVDHIYDAIRNYVTQKPYSKDKFKLYFQNPQFMGGWDKDKETDYRATILRYGSKYYLAIMDKKYAKCLQKIDKDDVNGNYEKINYKLLPGPNKMLPKVFFSKKWMAYYNPSEDIQKIYKNGTFKKGDMFNLNDCHKLIDFFKDSISRYPKWSNAYDFNFSETEKYKDIAGFYREVEEQGYKVSFESASKKEVDKLVEEGKLYMFQIYNKDFSDKSHGTPNLHTMYFKLLFDENNHGQIRLSGGAELFMRRASLKKEELVVHPANSPIANKNPDNPKKTTTLSYDVYKDKRFSEDQYELHIPIAINKCPKNIFKINTEVRVLLKHDDNPYVIGIARGERNLLYIVVVDGKGNIVEQYSLNEIINNFNGIRIKTDYHSLLDKKEKERFEARQNWTSIENIKELKAGYISQVVHKICELVEKYDAVIALEDLNSGFKNSRVKVEKQVYQKFEKMLIDKLNYMVDKKSNPCATGGALKGYQITNKFESFKSMSTQNGFIFYIPAWLTSKIDPSTGFVNLLKTKYTSIADSKKFISSFDRIMYVPEEDLFEFALDYKNFSRTDADYIKKWKLYSYGNRIRIFRNPKKNNVFDWEEVCLTSAYKELFNKYGINYQQGDIRALLCEQSDKAFYSSFMALMSLMLQMRNSITGRTDVDFLISPVKNSDGIFYDSRNYEAQENAILPKNADANGAYNIARKVLWAIGQFKKAEDEKLDKVKIAISNKEWLEYAQTSVKHSGGSKRTADGSEFEPKKKRKVGSG

SEQ ID NO: 167 - protein, 1616 aa, Artificial sequence
  Synthetic polypeptide
MKRTADGSEFESPKKKRKVSEVEFSHEYWMRHALTLAKRARDEREVPVGAVLVLNNRVIGEGWNRAIGLHDPTAHAEIMALRQGGLVMQNYRLIDATLYVTFEPCVMCAGAMIHSRIGRVVFGVRNSKRGAAGSLMNVLNYPGMNHRVEITEGILADECAALLCDFYRMPRQVFNAQKKAQSSINSGGSSGGSSGSETPGTSESATPESSGGSSGGSSKLEKFTNCYSLSKTLRFKAIPVGKTQENIDNKRLLVEDEKRAEDYKGVKKLLDRYYLSFINDVLHSIKLKNLNNYISLFRKKTRTEKENKELENLEINLRKEIAKAFKGNEGYKSLFKKDIIETILPEFLDDKDEIALVNSFNGFTTAFTGFFDNRENMFSEEAKSTSIAFRCINENLTRYISNMDIFEKVDAIFDKHEVQEIKEKILNSDYDVEDFFEGEFFNFVLTQEGIDVYNAIIGGFVTESGEKIKGLNEYINLYNQKTKQKLPKFKPLYKQVLSDRESLSFYGGSSGENQTTQKGQKNSRERMKRIEEGIKELGSQILKEHPVENTQLQNEKLYLYYLQNGRDMYVDQELDINRLSDYDVDHIVPQSFLKDDSIDNKVLTRSDKNRGKSDNVPSEEVVKKMKNYWRQLLNAKLITQRKFDNLTKAERGGLSEGYTSDEEVLEVFRNTLNKNSEIFSSIKKLEKLFKNFDEYSSAGIFVKNGPAISTISKDIFGEWNVIRDKWNAEYDDIHLKKKAVVTEKYEDDRRKSFKKIGSFSLEQLQEYADADLSVVEKLKEIIIQKVDEIYKVYGSSEKLFDADFVLEKSLKKNDAVVAIMKDLLDSVKSFENYIKAFFGEGKETNRDESFYGDFVLAYDILLKVDHIYDAIRNYVTQKPYSKDKFKLYFQNPQFMGGWDKDKETDYRATILRYGSKYYLAIMDKKYAKCLQKIDKDDVNGNYEKINYKLLPGPNKMLPKVFFSKKWMAYYNPSEDIQKIYKNGTFKKGDMFNLNDCHKLIDFFKDSISRYPKWSNAYDFNFSETEKYKDIAGFYREVEEQGYKVSFESASKKEVDKLVEEGKLYMFQIYNKDFSDKSHGTPNLHTMYFKLLFDENNHGQIRLSGGAELFMRRASLKKEELVVHPANSPIANKNPDNPKKTTTLSYDVYKDKRFSEDQYELHIPIAINKCPKNIFKINTEVRVLLKHDDNPYVIGIARGERNLLYIVVVDGKGNIVEQYSLNEIINNFNGIRIKTDYHSLLDKKEKERFEARQNWTSIENIKELKAGYISQVVHKICELVEKYDAVIALEDLNSGFKNSRVKVEKQVYQKFEKMLIDKLNYMVDKKSNPCATGGALKGYQITNKFESFKSMSTQNGFIFYIPAWLTSKIDPSTGFVNLLKTKYTSIADSKKFISSFDRIMYVPEEDLFEFALDYKNFSRTDADYIKKWKLYSYGNRIRIFRNPKKNNVFDWEEVCLTSAYKELFNKYGINYQQGDIRALLCEQSDKAFYSSFMALMSLMLQMRNSITGRTDVDFLISPVKNSDGIFYDSRNYEAQENAILPKNADANGAYNIARKVLWAIGQFKKAEDEKLDKVKIAISNKEWLEYAQTSVKHSGGSKRTADGSEFEPKKKRKVGSG

SEQ ID NO: 168 - protein, 1618 aa, Artificial sequence
  Synthetic polypeptide
MKRTADGSEFESPKKKRKVSEVEFSHEYWMRHALTLAKRARDEREVPVGAVLVLNNRVIGEGWNRAIGLHDPTAHAEIMALRQGGLVMQNYRLIDATLYVTFEPCVMCAGAMIHSRIGRVVFGVRNSKRGAAGSLMNVLNYPGMNHRVEITEGILADECAALLCDFYRMPRQVFNAQKKAQSSINSGGSSGGSSGSETPGTSESATPESSGGSSGGSSKLEKFTNCYSLSKTLRFKAIPVGKTQENIDNKRLLVEDEKRAEDYKGVKKLLDRYYLSFINDVLHSIKLKNLNNYISLFRKKTRTEKENKELENLEINLRKEIAKAFKGNEGYKSLFKKDIIETILPEFLDDKDEIALVNSFNGFTTAFTGFFDNRENMFSEEAKSTSIAFRCINENLTRYISNMDIFEKVDAIFDKHEVQEIKEKILNSDYDVEDFFEGEFFNFVLTQEGIDVYNAIIGGFVTESGEKIKGLNEYINLYNQKTKQKLPKFKPLYKQVLSDRESLSFYGGSSGENQTTQKGQKNSRERMKRIEEGIKELGSQILKEHPVENTQLQNEKLYLYYLQNGRDMYVDQELDINRLSDYDVDHIVPQSFLKDDSIDNKVLTRSDKNRGKSDNVPSEEVVKKMKNYWRQLLNAKLITQRKFDNLTKAERGGLSGSEGYTSDEEVLEVFRNTLNKNSEIFSSIKKLEKLFKNFDEYSSAGIFVKNGPAISTISKDIFGEWNVIRDKWNAEYDDIHLKKKAVVTEKYEDDRRKSFKKIGSFSLEQLQEYADADLSVVEKLKEIIIQKVDEIYKVYGSSEKLFDADFVLEKSLKKNDAVVAIMKDLLDSVKSFENYIKAFFGEGKETNRDESFYGDFVLAYDILLKVDHIYDAIRNYVTQKPYSKDKFKLYFQNPQFMGGWDKDKETDYRATILRYGSKYYLAIMDKKYAKCLQKIDKDDVNGNYEKINYKLLPGPNKMLPKVFFSKKWMAYYNPSEDIQKIYKNGTFKKGDMFNLNDCHKLIDFFKDSISRYPKWSNAYDFNFSETEKYKDIAGFYREVEEQGYKVSFESASKKEVDKLVEEGKLYMFQIYNKDFSDKSHGTPNLHTMYFKLLFDENNHGQIRLSGGAELFMRRASLKKEELVVHPANSPIANKNPDNPKKTTTLSYDVYKDKRFSEDQYELHIPIAINKCPKNIFKINTEVRVLLKHDDNPYVIGIARGERNLLYIVVVDGKGNIVEQYSLNEIINNFNGIRIKTDYHSLLDKKEKERFEARQNWTSIENIKELKAGYISQVVHKICELVEKYDAVIALEDLNSGFKNSRVKVEKQVYQKFEKMLIDKLNYMVDKKSNPCATGGALKGYQITNKFESFKSMSTQNGFIFYIPAWLTSKIDPSTGFVNLLKTKYTSIADSKKFISSFDRIMYVPEEDLFEFALDYKNFSRTDADYIKKWKLYSYGNRIRIFRNPKKNNVFDWEEVCLTSAYKELFNKYGINYQQGDIRALLCEQSDKAFYSSFMALMSLMLQMRNSITGRTDVDFLISPVKNSDGIFYDSRNYEAQENAILPKNADANGAYNIARKVLWAIGQFKKAEDEKLDKVKIAISNKEWLEYAQTSVKHSGGSKRTADGSEFEPKKKRKVGSG

SEQ ID NO: 169 - protein, 53 aa, Vibrio campbellii
CRVTGVQLKNHLIASHIKPWAVSNNQERLDGHNGLLLAPHVDHLFDKGFISFE

SEQ ID NO: 170 - protein, 137 aa, Bacillus thermoleovorans
MPNRPLKPCNKIGCTNLTRDRYCEQHKHLAEQRQRTRRNDKEYDKHKRNQQARAFYHSREWERVRLAVLARDNYLCQHCLKEKKITRAVIVDHVVPLLVDWSKRLDMDNLQSLCQSCHNRKTAEDKRRYGQGRSGKF

SEQ ID NO: 171 - protein, 49 aa, Bacillus phage SP01
KGKTFQVHRLVAIHFCEGYEEGLVVDHKDGNKDNNLSTNLRWVTQKINV

SEQ ID NO: 172 - protein, 156 aa, Neisseria meningitidis
SFKDRKEIEKRQEENRKDREKAAAKFREYFPNFVGEPKSKDILKLRLYEQQHGKCLYSGKEINLGRLNEKGYVEIDHALPFSRTWDDSFNNKVLVLGSENQNKGNQTPYEYFNGKDNSREWQEFKARVETSRFPRSKKQRILLQKFDEDGFKERNL

SEQ ID NO: 173 - protein, 53 aa, Vibrio campbellii; identical to SEQ ID NO: 169

SEQ ID NO: 174 - protein, 62 aa, Streptomyces coelicolor
SARGAVLKRCQKRCENPECAGHPTELTKAGLPILQVDHVNDLAKGGPDVPWNMIALCPNCHA

SEQ ID NO: 175 - protein, 4 aa, Artificial sequence
  Synthetic peptide
GSSG
